(19) United States
(12) Patent Application Publication
(10) Pub. No.: US 2019/0225955 A1
(43) Pub. Date: Jul. 25, 2019

(54) EVOLVED CAS9 PROTEINS FOR GENE EDITING

(71) Applicant: President and Fellows of Harvard College, Cambridge, MA (US)

(72) Inventors: David R. LIU, Lexington, MA (US); Johnny Hao HU, Cambridge, MA (US)

(73) Assignee: President and Fellows of Harvard College, Cambridge, MA (US)

(21) Appl. No.: 15/770,076

(22) PCT Filed: Oct. 22, 2016
(86) PCT No.: PCT/US2016/058345

§ 371 Date: Apr. 20, 2018

Related U.S. Application Data
(60) Provisional application No. 62/245,828, filed on Oct. 23, 2015.
(60) Provisional application No. 62/279,346, filed on Jan. 15, 2016.
(60) Provisional application No. 62/311,763, filed on Mar. 22, 2016.
(60) Provisional application No. 62/322,178, filed on Apr. 13, 2016.
(60) Provisional application No. 62/357,332, filed on Jun. 30, 2016.
(60) Provisional application No. 62/357,352, filed on Jun. 30, 2016.
(60) Provisional application No. 62/370,700, filed on Aug. 3, 2016.
(60) Provisional application No. 62/398,490, filed on Sep. 22, 2016.
(60) Provisional application No. 62/408,686, filed on Oct. 14, 2016.

(51) Int. Cl. C12N 9/22; C12N 15/11; C12N 9/78

(52) U.S. Cl. CPC C12N 9/22; C12N 15/11; C12N 9/78; C07K 2319/80; C12N 2800/80; C07K 2319/00; C12N 2310/20; C12Y 305/04005

(57) ABSTRACT

Some aspects of this disclosure provide strategies, systems, reagents, methods, and kits that are useful for enginerring Cas9 and Cas9 variants that have increased activity on target sequences that do not contain the canonical PAM sequence. In some embodiments, fusion proteins comprising such Cas9 variants and nucleic acid editing domains, e.g., deaminase domains, are provided.

### RELATED APPLICATIONS

[0001] This application claims priority under 35 U.S.C. § 119(e) to U.S. provisional patent applications, U.S. Ser. No. 62/245,828 filed Oct. 23, 2015, U.S. Ser. No. 62/279,346 filed Jan. 15, 2016, U.S. Ser. No. 62/311,763 filed Mar. 22, 2016, U.S. Ser. No. 62/322,178 filed Apr. 13, 2016, U.S. Ser. No. 62/357,352 filed Jun. 30, 2016, U.S. Ser. No. 62/370,700 filed Aug. 3, 2016, U.S. Ser. No. 62/398,490 filed Sep. 22, 2016, U.S. Ser. No. 62/408,686 filed Oct. 14, 2016, and U.S. Ser. No. 62/357,332 filed Jun. 30, 2016; each of which is incorporated herein by reference

### BACKGROUND OF THE INVENTION

[0002] Targeted editing of nucleic acid sequences, for example, the targeted cleavage or the targeted introduction of a specific modification into genomic DNA, is a highly promising approach for the study of gene function and also has the potential to provide new therapies for human genetic diseases.¹ An ideal nucleic acid editing technology possesses three characteristics: (1) high efficiency of installing the desired modification; (2) minimal off-target activity; and (3) the ability to be programmed to edit precisely any site in a given nucleic acid, e.g., any site within the human genome.² Current genome engineering tools, including engineered zinc finger nucleases (ZFNs),³ transcription activator like effector nucleases (TALENs),⁴ and most recently, the RNA-guided DNA endonuclease Cas9,⁵ effect sequence-specific DNA cleavage in a genome. This programmable cleavage can result in mutation of the DNA at the cleavage site via non-homologous end joining (NHEJ) or replacement of the DNA surrounding the cleavage site via homology-directed repair (HDR).^{6,7}

[0003] One drawback of the current technologies is that both NHEJ and HDR are stochastic processes that typically result in modest gene editing efficiencies as well as unwanted gene alterations that can compete with the desired alteration.⁸ Since many genetic diseases in principle can be treated by effecting a specific nucleotide change at a specific location in the genome (for example, a C to T change in a specific codon of a gene associated with a disease),⁹ the development of a programmable way to achieve such precise gene editing would represent both a powerful new research tool, as well as a potential new approach to gene editing-based human therapeutics.

[0004] Another drawback of current genome engineering tools is that they are limited with respect to the DNA sequences that can be targeted. When using ZNFs or TALENS, a new protein must be generated for each individual target sequence. While Cas9 can be targeted to virtually any target sequence by providing a suitable guide RNA, Cas9 technology is still limited with respect to the sequences that can be targeted by a strict requirement for a protospacer-adjacent motif (PAM), typically of the nucleotide sequence 5′-NGG-3′, that must be present immediately adjacent to the 3′-end of the targeted DNA sequence in order for the Cas9 protein to bind and act upon the target sequence. The PAM requirement thus limits the sequences that can be efficiently targeted by Cas9 proteins.

### SUMMARY OF THE INVENTION

[0005] Significantly, 80-90% of protein mutations responsible for human disease arise from the substitution, deletion, or insertion of only a single nucleotide.⁶ Most current strategies for single-base gene correction include engineered nucleases (which rely on the creation of double-strand breaks, DSBs, followed by stochastic, inefficient homology-directed repair, HDR), and DNA-RNA chimeric oligonucleotides.²² The latter strategy involves the design of a RNA/DNA sequence to base pair with a specific sequence in genomic DNA except at the nucleotide to be edited. The resulting mismatch is recognized by the cell's endogenous repair system and fixed, leading to a change in the sequence of either the chimera or the genome. Both of these strategies suffer from low gene editing efficiencies and unwanted gene alterations, as they are subject to both the stochasticity of HDR and the competition between HDR and non-homologous end-joining, NHEJ.²³⁻²⁵ HDR efficiencies vary according to the location of the target gene within the genome,²⁶ the state of the cell cycle,²⁷ and the type of cell/tissue.²⁸ The development of a direct, programmable way to install a specific type of base modification at a precise location in genomic DNA with enzyme-like efficiency and no stochasticity therefore represents a powerful new approach to gene editing-based research tools and human therapeutics.

[0006] The clustered regularly interspaced short palindromic repeat (CRISPR) system is a recently discovered prokaryotic adaptive immune system¹⁰ that has been modified to enable robust and general genome engineering in a variety of organisms and cell lines.¹¹ CRISPR-Cas (CRISPR-associated) systems are protein-RNA complexes that use an RNA molecule (sgRNA) as a guide to localize the complex to a target DNA sequence via base-pairing.¹² In the natural systems, a Cas protein then acts as an endonuclease to cleave the targeted DNA sequence.¹³ The target DNA sequence must be both complementary to the sgRNA and also contain a “protospacer-adjacent motif” (PAM) at the 3′-end of the complementary region in order for the system to function.¹⁴ The requirement for a PAM sequence limits the use of Cas9 technology, since not all desired targeted sequences include a PAM sequence at the 3′-end and thus cannot efficiently be targeted by wild-type Cas9 proteins.

[0007] Provided herein are novel Cas9 variants that exhibit activity on target sequences that do not include the canonical PAM sequence (5′-NGG-3′, where N is any nucleotide) at the 3′-end. Such Cas9 variants are not restricted to target sequences that include the canonical PAM sequence at the 3′-end.

[0008] Among the known Cas proteins, Streptococcus pyogenes Cas9 has been mostly widely used as a tool for genome engineering.¹⁵ This Cas9 protein is a large, multi-domain protein containing two distinct nuclease domains. Point mutations can be introduced into Cas9 to abolish nuclease activity, resulting in a dead Cas9 (dCas9) that still retains its ability to bind DNA in a sgRNA-programmed manner.¹⁶In principle, such Cas9 variants, when fused to another protein or domain, can target that protein to virtually any DNA sequence simply by co-expression with an appropriate sgRNA. Thus, this disclosure also comtemplates fusion proteins comprising such Cas9 variants and a DNA modifying domain (e.g., a deaminase, a nuclease, a nickase, a recombinase, a methyltransferase, a methylase, an acetylase, an acetyltransferase, a transcriptional activator, or a transcriptional repressor domain), as well as the use of such fusion proteins in correcting mutations in a genome (e.g., the genome of a human subject) that are associated with disease, or generating mutations in a genome (e.g., the human genome) to decrease or prevent expression of a gene.

[0009] In some embodiments, any of the Cas9 proteins provided herein may be fused to a protein that has an enzymatic activity. In some embodiments, the enzymatic activity modifies a target DNA. In some embodiments, the enzymatic activity is nuclease activity, methyltransferase activity, demethylase activity, DNA repair activity, DNA damage activity, deamination activity, dismutase activity, alkylation activity, depurination activity, oxidation activity, pyrimidine dimer forming activity, integrase activity, transposase activity, recombinase activity, polymerase activity, ligase activity, helicase activity, photolyase activity or glycosylase activity. In some cases, the enzymatic activity is nuclease activity. In some cases, the nuclease activity introduces a double strand break in the target DNA. In some cases, the enzymatic activity modifies a target polypeptide associated with the target DNA. In some cases, the enzymatic activity is methyltransferase activity, demethylase activity, acetyltransferase activity, deacetylase activity, kinase activity, phosphatase activity, ubiquitin ligase activity, deubiquitinating activity, adenylation activity, deadenylation activity, SUMOylating activity, deSUMOylating activity, ribosylation activity, deribosylation activity, myristoylation activity or demyristoylation activity. In some cases, the target polypeptide is a histone and the enzymatic activity is methyltransferase activity, demethylase activity, acetyltransferase activity, deacetylase activity, kinase activity, phosphatase activity, ubiquitin ligase activity or deubiquitinating activity.

[0010] In some embodiments, any of the Cas9 proteins provided herein may be fused to a protein that has an enzymatic activity. In some embodiments, the enzymatic activity modifies a polypeptide associated with DNA (e.g. a histone). In some embodiments, the enzymatic activity is methyltransferase activity, demethylase activity, acetyltransferase activity, deacetylase activity, kinase activity, phosphatase activity, ubiquitin ligase activity (i.e., ubiquitination activity), deubiquitinating activity, adenylation activity, deadenylation activity, SUMOylating activity, deSUMOylating activity, ribosylation activity, deribosylation activity, myristoylation activity, demyristoylation activity glycosylation activity (e.g., from O-GlcNAc transferase) or deglycosylation activity. The enzymatic activities listed herein catalyze covalent modifications to proteins. Such modifications are known in the art to alter the stability or activity of the target protein (e.g., phosphorylation due to kinase activity can stimulate or silence protein activity depending on the target protein). Of particular interest as protein targets are histones. Histone proteins are known in the art to bind DNA and form complexes known as nucleosomes. Histones can be modified (e.g., by methylation, acetylation, ubuitination, phosphorylation) to elicit structural changes in the surrounding DNA, thus controlling the accessibility of potentially large portions of DNA to interacting factors such as transcription factors, polymerases and the like. A single histone can be modified in many different ways and in many different combinations (e.g., trimethylation of lysine 27 of histone 3, H3K27, is associated with DNA regions of repressed transcription while trimethylation of lysine 4 of histone 3, H3K4, is associated with DNA regions of active transcription). Thus, a site-directed modifying polypeptide with histone-modifying activity finds use in the site specific control of DNA structure and can be used to alter the histone modification pattern in a selected region of target DNA. Such methods find use in both research and clinical applications.

[0011] In some embodiments, the deaminase domain catalyzes the removal of an amine group from a molecule. In further embodiments, cytidine deaminase domains deaminate cytosine to yield uracil. In other embodiments, the nuclease domain has enzymatic activity and may cleave phosphodiester bonds between the nucleotide subunits of nucleic acids. In some embodiments, recombinase domains, which recombine specific sequences of DNA, may be used to manipulate the structure of genomes and to control gene expression. In further embodiments, methylase domains may be utilized to methylate their respective substrates, while acetylase domains may be used to acetylate their respective substrates. In other embodiments, acetyltransferase domains may be used to transfer an acetyl group. Examples of acetyltransferase molecules include, but are not limited to, histone acetyltransferases (e.g., CBP histone acetyltransferase), choline acetyltransferase, chloramphenicol acetytransferase, serotonic N-acetyltransferase, NatA acetyltransferase, and NatB acetyltransferase. The disclosure also contemplates transcriptional activator and transcriptional repressor domains. Transcriptional activator domains are regions of a transcription factor which may activate transcription from a promoter through an interaction or multiple interactions with a DNA binding domain, general transcription factors, and RNA polymerase. Transcriptional repressor domins are regions of a transcription factor which may repress transcription from a protomer through an interaction or multiple interactions with a DNA binding domain, general transcription factors, and RNA polymerase.

[0012] The potential of the Cas9 system for genome engineering is immense. Its unique ability to bring proteins to specific sites in a genome programmed by the sgRNA can be developed into a variety of site-specific genome engineering tools beyond nucleases, including transcriptional activators, transcriptional repressors, histone-modifying proteins, integrases, deaminases, and recombinases.¹¹ Some of these potential applications have recently been implemented through dCas9 fusions with transcriptional activators to afford RNA-guided transcriptional activators,^{17,18} transcriptional repressors,^{16,19,20} and chromatin modification enzymes.²¹ Simple co-expression of these fusions with a variety of sgRNAs results in specific expression of the target genes. These seminal studies have paved the way for the design and construction of readily programmable sequence-specific effectors for the precise manipulation of genomes.

[0013] Some aspects of this disclosure provide strategies, systems, proteins, nucleic acids, compositions, cells, reagents, methods, and kits that are useful for the targeted binding, editing, and/or cleaving of nucleic acids, including editing a single site within a subject's genome, e.g., a human subject's genome. In some embodiments, recombinant Cas9 proteins are provided that comprise at least one, at least two, at least three, at least four, at least five, at least six, at least seven, at least eight, at least nine, or at least ten mutations as compared to a naturally occurring Cas9 protein, and that exhibit activity on target sequences that do not include the canonical PAM (5′-NGG-3′, where N is any nucleotide) at the 3′-end. Examples of such Cas9 protein mutations are given in Tables 3, 5, 8, and 9. In some embodiments, fusion proteins of Cas9 and nucleic acid editing enzymes or enzymatic domains, e.g., deaminase domains, are provided. In some embodiments, methods for targeted nucleic acid binding, editing, and/or cleaving are provided. In some embodiments, reagents and kits for the generation of targeted nucleic acid binding, editing, and/or cleaving proteins, e.g., fusion proteins of Cas9 variants and nucleic acid editing enzymes or domains, are provided.

[0014] Some aspects of this disclosure provide recombinant Cas9 proteins comprising an amino acid sequence that is at least 80%, at least 85%, at least 90%, at least 92%, at least 95%, at least 96%, at least 97%, at least 98%, at least 99%, or at least 99.5% identical to the amino acid sequence of Cas9 as provided by any of the sequences set forth in SEQ ID NOs: 9-262, wherein the amino acid sequence of the Cas9 protein comprises at least one, at least two, at least three, at least four, at least five, at least six, or at least seven mutations in an amino acid residue selected from the group consisting of amino acid residues 122, 137, 182, 262, 294, 409, 480, 543, 660, 694, 1219, and 1329 of S. pyogenes Cas9 having the amino acid sequence provided in SEQ ID NO: 9, or in a corresponding amino acid residue in any of the amino acid sequences provided in SEQ ID NOs: 10-262. In some embodiments, the recombinant Cas9 protein comprises a RuvC and an HNH domain. In some embodiments, the amino acid sequence of the recombinant Cas9 protein is not identical to the amino acid sequence of a naturally occurring Cas9 protein. In some embodiments, the amino acid sequence of the Cas9 protein comprises at least one, at least two, at least three, at least four, at least five, at least six, or at least seven mutations selected from the group consisting of X262T, X294R, X409I, X480K, X543D, X694I, and X1219V of the amino acid sequence provided in SEQ ID NO: 9, or a corresponding mutation in any of the amino acid sequences provided in SEQ ID NOs: 10-262, wherein X represents any amino acid. In some embodiments, the amino acid sequence of the Cas9 protein comprises at least one, at least two, at least three, at least four, at least five, at least six, or at least seven mutations selected from the group consisting of A262T, K294R, S409I, E480K, E543D, M694I, and E1219V of the amino acid sequence provided in SEQ ID NO: 9, or a corresponding mutation in any of the amino acid sequences provided in SEQ ID NOs: 10-262.

[0015] Other aspects of this disclosure provide recombinant Cas9 proteins comprising an amino acid sequence that is at least 80%, at least 85%, at least 90%, at least 92%, at least 95%, at least 96%, at least 97%, at least 98%, at least 99%, or at least 99.5% identical to the amino acid sequence of Cas9 as provided by any of the sequences set forth in SEQ ID NOs: 10-262, wherein the amino acid sequence of the Cas9 protein comprises at least one, at least two, at least three, at least four, at least five, at least six, or at least seven mutations in an amino acid residue selected from the group consisting of amino acid residues 262, 267, 294, 405, 409, 480, 543, 694, 1219, 1224, 1256, and 1362 of the amino acid sequence provided in SEQ ID NO: 9, or in a corresponding amino acid residue in any of the amino acid sequences provided in SEQ ID NOs: 10-262; and wherein the amino acid sequence of the recombinant Cas9 protein is not identical to the amino acid sequence of a naturally occurring Cas9 protein. In some embodiments, the Cas9 protein comprises a RuvC and an HNH domain. In some embodiments, the amino acid sequence of the Cas9 protein comprises at least one, at least two, at least three, at least four, at least five, at least six, or at least seven mutations selected from the group consisting of X262T, X267G, X294R, X405I, X409I, X480K, X543D, X694I, X1219V, X1224K, and X1256K of the amino acid sequence provided in SEQ ID NO: 9, or a corresponding mutation in any of the amino acid sequences provided in SEQ ID NOs: 10-262, wherein X represents any amino acid. In some embodiments, the amino acid sequence of the Cas9 protein comprises at least one, at least two, at least three, at least four, at least five, at least six, or at least seven mutations selected from the group consisting of A262T, S267G, K294R, F405I, S409I, E480K, E543D, M694I, E1219V, N1224K, and Q1256K of the amino acid sequence provided in SEQ ID NO: 9, or a corresponding mutation in any of the amino acid sequences provided in in SEQ ID NOs: 10-262.

[0016] It should be appreciated that any of the amino acid mutations described herein, (e.g., A262T) from a first amino acid residue (e.g., A) to a second amino acid residue (e.g., T) may also include mutations from the first amino acid residue to an amino acid residue that is similar to (e.g., conserved) the second amino acid residue. For example, a mutation of an alanine to a threonine (e.g., a A262T mutation) may also be a mutation from an alanine to an amino acid that is similar in size and chemical properties to a threonine, for example, serine. Additional similar amino acid pairs include, but are not limited to, the following: phenylalanine and tyrosine; asparagine and glutamine; methionine and cysteine; aspartic acid and glutamic acid; and arginine and lysine. The skilled artisan would recognize that such conservative amino acid substitutions will likely have minor effects on protein structure and are likely to be well tolerated without compromising function. In some embodiments, any amino of the amino acid mutations provided herein from one amino acid to a threonine may be an amino acid mutation to a serine. In some embodiments, any amino of the amino acid mutations provided herein from one amino acid to an arginine may be an amino acid mutation to a lysine. In some embodiments, any amino of the amino acid mutations provided herein from one amino acid to an isoleucine, may be an amino acid mutation to an alanine, valine, methionine, or leucine. In some embodiments, any amino of the amino acid mutations provided herein from one amino acid to a lysine may be an amino acid mutation to an arginine. In some embodiments, any amino of the amino acid mutations provided herein from one amino acid to an aspartic acid may be an amino acid mutation to a glutamic acid or asparigine. In some embodiments, any amino of the amino acid mutations provided herein from one amino acid to a valine may be an amino acid mutation to an alanine, isoleucine, methionine, or leucine. In some embodiments, any amino of the amino acid mutations provided herein from one amino acid to a glycine may be an amino acid mutation to an alanine. It should be appreciated, however, that additional conserved amino acid residues would be recognized by the skilled artisan and any of the amino acid mutations to other conserved amino acid residues are also within the scope of this disclosure.

[0017] In some embodiments, the Cas9 protein is a Cas9 domain of a fusion protein. In some embodiments, the amino acid sequence of the Cas9 protein comprises an X1219V mutation of the amino acid sequence provided in SEQ ID NO: 9, or a corresponding mutation in any of the amino acid sequences provided in SEQ ID NOs: 10-262, wherein X represents any amino acid. In some embodiments, the mutation is X1219A, X1219I, X1219M, or X1219L.

[0018] In some embodiments, the amino acid sequence of the Cas9 protein comprises an E1219V mutation of the amino acid sequence provided in SEQ ID NO: 9, or a corresponding mutation in any of the amino acid sequences provided in SEQ ID NOs: 10-262. In some embodiments, the mutation is E1219A, E1219I, E1219M or E1219L.

[0019] In some embodiments, the amino acid sequence of the Cas9 protein comprises an X480K mutation of the amino acid sequence provided in SEQ ID NO: 9, or a corresponding mutation in any of the amino acid sequences provided in SEQ ID NOs: 10-262, wherein X represents any amino acid. In some embodiments, the mutation is X480R.

[0020] In some embodiments, the amino acid sequence of the Cas9 protein comprises an E480K mutation of the amino acid sequence provided in SEQ ID NO: 9, or a corresponding mutation in any of the amino acid sequences provided in SEQ ID NOs: 10-262. In some embodiments, the mutation is E480R.

[0021] In some embodiments, the amino acid sequence of the Cas9 protein comprises an X543D mutation of the amino acid sequence provided in SEQ ID NO: 9, or a corresponding mutation in any of the amino acid sequences provided in SEQ ID NOs: 10-262, wherein X represents any amino acid. In some embodiments, the mutation is X543N.

[0022] In some embodiments, the amino acid sequence of the Cas9 protein comprises an E543D mutation of the amino acid sequence provided in SEQ ID NO: 9, or a corresponding mutation in any of the amino acid sequences provided in SEQ ID NOs: 10-262. In some embodiments, the mutation is E543N.

[0023] In some embodiments, the amino acid sequence of the Cas9 protein comprises the mutations X480K, X543D, and X1219V of the amino acid sequence provided in SEQ ID NO: 9, or a corresponding mutation in any of the amino acid sequences provided in SEQ ID NOs: 10-262, wherein X represents any amino acid.

[0024] In some embodiments, the amino acid sequence of the Cas9 protein comprises the mutations X262T, X409I, X480K, X543D, X694I, and X1219V of the amino acid sequence provided in SEQ ID NO: 9, or a corresponding mutation in any of the amino acid sequences provided in SEQ ID NOs: 10-262, wherein X represents any amino acid.

[0025] In some embodiments, the amino acid sequence of the Cas9 protein comprises the mutations X294R, X480K, X543D, X1219V, X1256K, and X1362P of the amino acid sequence provided in SEQ ID NO: 9, or a corresponding mutation in any of the amino acid sequences provided in SEQ ID NOs: 10-262, wherein X represents any amino acid.

[0026] In some embodiments, the amino acid sequence of the Cas9 protein comprises the mutations X294R, X480K, X543D, X1219V, and X1256K of the amino acid sequence provided in SEQ ID NO: 9, or a corresponding mutation in any of the amino acid sequences provided in SEQ ID NOs: 10-262, wherein X represents any amino acid.

[0027] In some embodiments, the amino acid sequence of the Cas9 protein comprises the mutations X267G, X294R, X480K, X543D, X1219V, X1224K, and X1256K of the amino acid sequence provided in SEQ ID NO: 9, or a corresponding mutation in any of the amino acid sequences provided in SEQ ID NOs: 10-262, wherein X represents any amino acid.

[0028] In some embodiments, the amino acid sequence of the Cas9 protein comprises the mutations X262T, X405I, X409I, X480K, X543D, X694I, and X1219V of the amino acid sequence provided in SEQ ID NO: 9, or a corresponding mutation in any of the amino acid sequences provided in SEQ ID NOs: 10-262, wherein X represents any amino acid.

[0029] In some embodiments, the amino acid sequence of the Cas9 protein comprises the mutations E480K, E543D, and E1219V of the amino acid sequence provided in SEQ ID NO: 9, or a corresponding mutation in any of the amino acid sequences provided in SEQ ID NOs: 10-262.

[0030] In some embodiments, the amino acid sequence of the Cas9 protein comprises the mutations A262T, S409I, E480K, E543D, M694I, and E1219V of the amino acid sequence provided in SEQ ID NO: 9, or a corresponding mutation in any of the amino acid sequences provided in SEQ ID NOs: 10-262.

[0031] In some embodiments, the amino acid sequence of the Cas9 protein comprises the mutations K294R, E480K, E543D, E1219V, Q1256K, and L1362P of the amino acid sequence provided in SEQ ID NO: 9, or a corresponding mutation in any of the amino acid sequences provided in SEQ ID NOs: 10-262.

[0032] In some embodiments, the amino acid sequence of the Cas9 protein comprises the mutations K294R, E480K, E543D, E1219V, and Q1256K of the amino acid sequence provided in SEQ ID NO: 9, or a corresponding mutation in any of the amino acid sequences provided in SEQ ID NOs: 10-262.

[0033] In some embodiments, the amino acid sequence of the Cas9 protein comprises the mutations S267G, K294R, E480K, E543D, E1219V, N1224K, and Q1256K of the amino acid sequence provided in SEQ ID NO: 9, or a corresponding mutation in any of the amino acid sequences provided in SEQ ID NOs: 10-262.

[0034] In some embodiments, the amino acid sequence of the Cas9 protein comprises the mutations A262T, F405I, S409I, E480K, E543D, M694I, and E1219V of the amino acid sequence provided in SEQ ID NO: 9, or a corresponding mutation in any of the amino acid sequences provided in SEQ ID NOs: 10-262.

[0035] The HNH nuclease domain of Cas9 functions to cleave the DNA strand complementary to the guide RNA (gRNA). Its active site consists of a ββα-metal fold, and its histidine 840 activates a water molecule to attack the scissile phosphate, which is more electrophilic due to coordination with a magnesium ion, resulting in cleavage of the the 3′-5′ phosphate bond. In some embodiments, the amino acid sequence of the HNH domain is at least 80%, at least 85%, at least 90%, at least 92%, at least 95%, at least 96%, at least 97%, at least 98%, at least 99%, or at least 99.5% identical to the amino acid sequence of the HNH domain of any of SEQ ID NOs: 9-262. In some embodiments, the amino acid sequence of the HNH domain is identical to the amino acid sequence of the HNH domain of any of SEQ ID NOs: 9-262.

[0036] The RuvC domain of Cas9 cleaves the non-target DNA strand. It is encoded by sequentially disparate sites which interact in the tertiary structure to form the RuvC cleaveage domain and consists of an RNase H fold structure. In some embodiments, the amino acid sequence of the RuvC domain is at least 80%, at least 85%, at least 90%, at least 92%, at least 95%, at least 96%, at least 97%, at least 98%, at least 99%, or at least 99.5% identical to the amino acid sequence of the RuvC domain of any of SEQ ID NOs: 9-262. In some embodiments, the amino acid sequence of the RuvC domain is identical to the amino acid sequence of the RuvC domain of any of SEQ ID NOs: 9-262.

[0037] In some embodiments, the Cas9 protein comprises one or more mutations that affects (e.g., inhibits) the ability of Cas9 to cleave one or both strands of a DNA duplex. In some embodiments, the Cas9 protein comprises a D10A and/or a H840A mutation of the amino acid sequence provided in SEQ ID NO: 9, or a corresponding mutation in any of the amino acid sequences provided in SEQ ID NOs: 10-262. In some embodiments, the Cas9 protein comprises a D10X₁ and/or a H840X₂ mutation of the amino acid sequence provided in SEQ ID NO: 9, or a corresponding mutation in any of the amino acid sequences provided in SEQ ID NOs: 10-262, wherein X₁ is any amino acid except for D, and X₂ is any amino acid except for H. In some embodiments, the Cas9 protein comprises an D10A mutation of the amino acid sequence provided in SEQ ID NO: 9, or a corresponding mutation in any of the amino acid sequences provided in SEQ ID NOs: 10-262. In some embodiments, the Cas9 protein comprises an H at amino acid residue 840 of the amino acid sequence provided in SEQ ID NO: 9, or a corresponding residue in any of the amino acid sequences provided in SEQ ID NOs: 10-262. In some embodiments, the Cas9 protein comprises an H840A mutation of the amino acid sequence provided in SEQ ID NO: 9, or a corresponding mutation in any of the amino acid sequences provided in SEQ ID NOs: 10-262. In some embodiments, the Cas9 protein comprises a D at amino acid residue 10 of the amino acid sequence provided in SEQ ID NO: 9, or a corresponding residue in any of the amino acid sequences provided in SEQ ID NOs: 10-262.

[0038] In some embodiments, the Cas9 protein of the present disclosure exhibits activity, for example, increased binding, on a target sequence that does not include the canonical PAM sequence (5′-NGG-3′) at its 3′-end as compared to Streptococcus pyogenes Cas9 as provided by SEQ ID NO: 9.

[0039] Some aspects of this disclosure provide recombinant Cas9 proteins comprising an amino acid sequence that is at least 90% identical to the amino acid sequence of Streptococcus pyogenes Cas9 as provided by SEQ ID NO: 9 wherein the amino acid sequence of the Cas9 protein comprises at least one, at least two, at least three, at least four, at least five, at least six, or at least seven mutations selected from the group consisting of amino acid residues 262, 267, 294, 405, 409, 480, 543, 694, 1219, 1224, 1256, and 1362 of the amino acid sequence provided in SEQ ID NO: 9, wherein the amino acid sequence of the recombinant Cas9 protein is not identical to the amino acid sequence of a naturally occurring Cas9 protein, and wherein the recombinant Cas9 protein exhibits increased activity on a target sequence that does not comprise the canonical PAM sequence (5′-NGG-3′) at its 3′ end as compared to Streptococcus pyogenes Cas9 as provided in SEQ ID NO: 9. In some embodiments, the Streptococcus pyogenes Cas9 comprises a RuvC and an HNH domain. In other embodiments, the Cas9 protein comprises at least one, at least two, at least three, at least four, at least five, at least six, or at least seven mutations selected from the group consisting of amino acid residues 122, 137, 182, 262, 294, 409, 480, 543, 660, 694, 1219, and 1329 of the amino acid sequence provided in SEQ ID NO: 9

[0040] As one example, the Cas9 protein may exhibit increased binding to the target sequence, may exhibit increased nuclease activity at the target sequence, or may exhibit an increase in other activities, depending on whether the Cas 9 protein is fused to an additional domain, such as an enzyme that has enzymatic activity. In some embodiments, the enzymatic activity modifies a target DNA. In some embodiments, the enzymatic activity is nuclease activity, methyltransferase activity, demethylase activity, DNA repair activity, DNA damage activity, deamination activity, dismutase activity, alkylation activity, depurination activity, oxidation activity, pyrimidine dimer forming activity, integrase activity, transposase activity, recombinase activity, polymerase activity, ligase activity, helicase activity, photolyase activity or glycosylase activity. In some cases, the enzymatic activity is nuclease activity. In some cases, the nuclease activity introduces a double strand break in the target DNA. In some cases, the enzymatic activity modifies a target polypeptide associated with the target DNA. In some cases, the enzymatic activity is methyltransferase activity, demethylase activity, acetyltransferase activity, deacetylase activity, kinase activity, phosphatase activity, ubiquitin ligase activity, deubiquitinating activity, adenylation activity, deadenylation activity, SUMOylating activity, deSUMOylating activity, ribosylation activity, deribosylation activity, myristoylation activity or demyristoylation activity. In some cases, the target polypeptide is a histone and the enzymatic activity is methyltransferase activity, demethylase activity, acetyltransferase activity, deacetylase activity, kinase activity, phosphatase activity, ubiquitin ligase activity or deubiquitinating activity.

[0041] In some embodiments, any of the Cas9 protein is fused to a protein that has an enzymatic activity. In some embodiments, the enzymatic activity modifies a polypeptide associated with DNA (e.g. a histone). In some embodiments, the enzymatic activity is methyltransferase activity, demethylase activity, acetyltransferase activity, deacetylase activity, kinase activity, phosphatase activity, ubiquitin ligase activity (i.e., ubiquitination activity), deubiquitinating activity, adenylation activity, deadenylation activity, SUMOylating activity, deSUMOylating activity, ribosylation activity, deribosylation activity, myristoylation activity, demyristoylation activity glycosylation activity (e.g., from O-GlcNAc transferase) or deglycosylation activity. The enzymatic activities listed herein catalyze covalent modifications to proteins. Such modifications are known in the art to alter the stability or activity of the target protein (e.g., phosphorylation due to kinase activity can stimulate or silence protein activity depending on the target protein). Of particular interest as protein targets are histones. Histone proteins are known in the art to bind DNA and form complexes known as nucleosomes. Histones can be modified (e.g., by methylation, acetylation, ubuitination, phosphorylation) to elicit structural changes in the surrounding DNA, thus controlling the accessibility of potentially large portions of DNA to interacting factors such as transcription factors, polymerases and the like. A single histone can be modified in many different ways and in many different combinations (e.g., trimethylation of lysine 27 of histone 3, H3K27, is associated with DNA regions of repressed transcription while trimethylation of lysine 4 of histone 3, H3K4, is associated with DNA regions of active transcription). Thus, a site-directed modifying polypeptide with histone-modifying activity finds use in the site specific control of DNA structure and can be used to alter the histone modification pattern in a selected region of target DNA. Such methods find use in both research and clinical applications.

[0042] In some embodiments, the Cas9 protein exhibits activity on a target sequence having a 3′ end that is not directly adjacent to, or does not have the canonical PAM sequence (5′-NGG-3′), that is at least 2-fold, at least 3-fold, at least 5-fold, at least 10-fold, at least 50-fold, at least 100-fold, at least 500-fold, at least 1,000-fold, at least 5,000-fold, at least 10,000-fold, at least 50,000-fold, at least 100,000-fold, at least 500,000-fold, or at least 1,000,000-fold increased as compared to the activity of Streptococcus pyogenes Cas9 as provided by SEQ ID NO: 9 on the same target sequence.

[0043] In some embodiments, the 3′-end of the target sequence is directly adjacent to an AGC, GAG, TTT, GTG, CAA CAC, GAT, TAA, ACG, CGA, or CGT sequence.

[0044] In some embodiments, the Cas9 protein activity is measured by a nuclease assay or a nucleic acid binding assay, which are known in the art and would be apparent to the skilled artisan. As provided herein, the Cas9 protein may be fused to one or more domains that confer an activity to the protein, such as a nucleic acid editing activity (e.g., deaminase activity or transcriptional activation activity), which may be measured (e.g., by a deaminase assay or transcriptional activation assay). In some embodiments, the Cas9 protein is fused to a deaminase domain and its activity may be measured using a deaminase assay. In some embodiments, the Cas9 protein is fused to a transcriptional activation domain and its activity may be measured using a transcriptional activation assay, for example, reporter activation assay where the reporter, e.g., GFP or luciferase, among others, is expressed in response to Cas9 binding to a target sequence.

[0045] In some embodiments, the amino acid sequence of the Cas9 protein comprises any of the mutations provided herein. For example, in some embodiments, the amino acid sequence of the Cas9 protein comprises at least one, at least two, at least three, at least four, at least five, at least six, or at least seven mutations selected from the group consisting of X262T, X267G, X294R, X405I, X409I, X480K, X543D, X694I, X1219V, X1224K, X1256K, and X1362P of the amino acid sequence provided in SEQ ID NO: 9, or a corresponding mutation in any of the amino acid sequences provided in SEQ ID NOs: 10-262, wherein X represents any amino acid. In other embodiments, the mutations may be A262T, S267G, K294R, F405I, S409I, E480K, E543D, M694I, E1219V, N1224K, Q1256K, and L1362P of the amino acid sequence provided in SEQ ID NO: 9, or a corresponding mutation in any of the amino acid sequences provided in SEQ ID NOs: 10-262.

[0046] In some embodiments, the amino acid sequence of the Cas9 protein comprises any of the mutations provided herein. For example, in some embodiments, the amino acid sequence of the Cas9 protein comprises at least one, at least two, at least three, at least four, at least five, at least six, or at least seven mutations selected from the group consisting of X262T, X294R, X409I, X480K, X543D, X694I, and X1219V of the amino acid sequence provided in SEQ ID NO: 9, or a corresponding mutation in any of the amino acid sequences provided in SEQ ID NOs: 10-262, wherein X represents any amino acid. In other embodiments, the mutations may be A262T, K294R, S409I, E480K, E543D, M694I, or E1219V of the amino acid sequence provided in SEQ ID NO: 9, or a corresponding mutation in any of the amino acid sequences provided in SEQ ID NOs: 10-262.

[0047] In some embodiments, the amino acid sequence of the Cas9 protein comprises an X1219V mutation or an E1219V mutation of the amino acid sequence provided in SEQ ID NO: 9, or a corresponding mutation in any of the amino acid sequences provided in SEQ ID NOs: 10-262, wherein X represents any amino acid.

[0048] In some embodiments, the amino acid sequence of the Cas9 protein comprises an X480K mutation or an E480K mutation of the amino acid sequence provided in SEQ ID NO: 9, or a corresponding mutation in any of the amino acid sequences provided in SEQ ID NOs: 10-262, wherein X represents any amino acid.

[0049] In some embodiments, the amino acid sequence of the Cas9 protein comprises an X543D mutation or a E543D mutation of the amino acid sequence provided in SEQ ID NO: 9, or a corresponding mutation in any of the amino acid sequences provided in SEQ ID NOs: 10-262, wherein X represents any amino acid.

[0050] In some embodiments, the amino acid sequence of the Cas9 comprises the mutations X480K, X543D, and X1219V; or the mutations E480K, E543D, and E1219V of the amino acid sequence provided in SEQ ID NO: 9, or a corresponding mutation in any of the amino acid sequences provided in SEQ ID NOs: 10-262, wherein X represents any amino acid.

[0051] In some embodiments, the amino acid sequence of the Cas9 comprises the mutations X262T, X409I, X480K, X543D, X694I, and X1219V; or the mutations A262T, S409I, E480K, E543D, M694I, and E1219V of the amino acid sequence provided in SEQ ID NO: 9, or a corresponding mutation in any of the amino acid sequences provided in SEQ ID NOs: 10-262, wherein X represents any amino acid.

[0052] In some embodiments, the amino acid sequence of the Cas9 protein comprises the mutations X294R, X480K, X543D, X1219V, X1256K, and X1362P; or the mutations K294R, E480K, E543D, E1219V, Q1256K, and L1362P of the amino acid sequence provided in SEQ ID NO: 9, or a corresponding mutation in any of the amino acid sequences provided in SEQ ID NOs: 10-262, wherein X represents any amino acid.

[0053] In some embodiments, the amino acid sequence of the Cas9 protein comprises the mutations X294R, X480K, X543D, X1219V, and X1256K, or mutations K294R, E480K, E543D, E1219V, and Q1256K of the amino acid sequence provided in SEQ ID NO: 9, or a corresponding mutation in any of the amino acid sequences provided in SEQ ID NOs: 10-262, wherein X represents any amino acid.

[0054] In some embodiments, the amino acid sequence of the Cas9 protein comprises the mutations X267G, X294R, X480K, X543D, X1219V, X1224K, and X1256K; or the mutations S267G, K294R, E480K, E543DE1219V, N1224K, and Q1256K of the amino acid sequence provided in SEQ ID NO: 9, or a corresponding mutation in any of the amino acid sequences provided in SEQ ID NOs: 10-262, wherein X represents any amino acid.

[0055] In some embodiments, the amino acid sequence of the Cas9 protein comprises the mutations X262T, X405I, X409I, X480K, X543D, X694I, and X1219V; or the mutations A262T, F405I, S409I, E480K, E543D, M694I, and E1219V of the amino acid sequence provided in SEQ ID NO: 9, or a corresponding mutation in any of the amino acid sequences provided in SEQ ID NOs: 10-262, wherein X represents any amino acid.

[0056] In some embodiments, the amino acid sequence of the HNH domain is at least 80%, at least 85%, at least 90%, at least 92%, at least 95%, at least 96%, at least 97%, at least 98%, at least 99%, or at least 99.5% identical to the amino acid sequence of the HNH domain of any of SEQ ID NOs: 9-262. In some embodiments, the amino acid sequence of the HNH domain is identical to the amino acid sequence of any of the HNH domains of SEQ ID NOs: 9-262.

[0057] In some embodiments, the amino acid sequence of the RuvC domain is at least 80%, at least 85%, at least 90%, at least 92%, at least 95%, at least 96%, at least 97%, at least 98%, at least 99%, or at least 99.5% identical to the amino acid sequence of the RuvC domain of any of SEQ ID NOs: 9-262. In some embodiments, the amino acid sequence of the RuvC domain is identical to the amino acid sequence of any of the RuvC domains of SEQ ID NOs: 9-262.

[0058] In some embodiments, the Cas9 protein comprises at D10A and/or a H840A mutation in the amino acid sequence provided in SEQ ID NO: 9, or a corresponding mutation in any of the amino acid sequences provided in SEQ ID NOs: 10-262. In some embodiments, the Cas9 protein comprises a D10X₁ and/or a H840X₂ mutation of the amino acid sequence provided in SEQ ID NO: 9, or a corresponding mutation in any of the amino acid sequences provided in SEQ ID NOs: 10-262, wherein X₁ is any amino acid except for D, and wherein X₂ is any amino acid except for H. In some embodiments, the Cas9 protein comprises an D10A mutation of the amino acid sequence provided in SEQ ID NO: 9, or a corresponding mutation in any of the amino acid sequences provided in SEQ ID NOs: 10-262. In some embodiments, the Cas9 protein comprises an H at amino acid residue 840 of the amino acid sequence provided in SEQ ID NO: 9, or a corresponding residue in any of the amino acid sequences provided in SEQ ID NOs: 10-262. In some embodiments, the Cas9 protein comprises an H840A mutation of the amino acid sequence provided in SEQ ID NO: 9, or a corresponding mutation in any of the amino acid sequences provided in SEQ ID NOs: 10-262. In some embodiments, the Cas9 protein comprises an D at amino acid residue 10 of the amino acid sequence provided in SEQ ID NO: 9, or a corresponding residue in any of the amino acid sequences provided in SEQ ID NOs: 10-262.

[0059] Some aspects of this disclosure provide fusion proteins comprising a Cas9 protein as provided herein that is fused to a second protein, thus forming a fusion protein. In some embodiments, the second protein is fused to the N-terminus of the Cas9 protein. In some embodiments, the second protein is fused to the C-terminus of the Cas9 protein. In some embodiments, the Cas9 domain and the effector domain are fused via a linker. The linker may be as simple as a covalent bond, or it may be a polymeric linker many atoms in length. In certain embodiments, the linker is a polpeptide or based on amino acids. In other embodiments, the linker is not peptide-like. In certain embodiments, the linker is a covalent bond (e.g., a carbon-carbon bond, disulfide bond, carbon-heteroatom bond, etc.). In certain embodiments, the linker is a carbon-nitrogen bond of an amide linkage. In certain embodiments, the linker is a cyclic or acyclic, substituted or unsubstituted, branched or unbranched aliphatic or heteroaliphatic linker. In certain embodiments, the linker is polymeric (e.g., polyethylene, polyethylene glycol, polyamide, polyester, etc.). In certain embodiments, the linker comprises a monomer, dimer, or polymer of aminoalkanoic acid. In certain embodiments, the linker comprises an aminoalkanoic acid (e.g., glycine, ethanoic acid, alanine, beta-alanine, 3-aminopropanoic acid, 4-aminobutanoic acid, 5-pentanoic acid, etc.). In certain embodiments, the linker comprises a monomer, dimer, or polymer of aminohexanoic acid (Ahx). In certain embodiments, the linker is based on a carbocyclic moiety (e.g., cyclopentane, cyclohexane). In other embodiments, the linker comprises a polyethylene glycol moiety (PEG). In other embodiments, the linker comprises amino acids. In certain embodiments, the linker comprises a peptide. In certain embodiments, the linker comprises an aryl or heteroaryl moiety. In certain embodiments, the linker is based on a phenyl ring. The linker may included functionalized moieties to facilitate attachment of a nucleophile (e.g., thiol, amino) from the peptide to the linker. Any electrophile may be used as part of the linker. Exemplary electrophiles include, but are not limited to, activated esters, activated amides, Michael acceptors, alkyl halides, aryl halides, acyl halides, and isothiocyanates.

[0060] In some embodiments, the linker comprises a chemical group or molecule linking two molecules or moieties, e.g., two domains of a fusion protein, such as, for example, a nuclease-inactive Cas9 domain and a effector domain (e.g., a deaminase domain). In some embodiments, the linker comprises one or more amino acid residues. For example, the linker may comprise at least 1, 2, 3, 4, 5, 6, 7, 8, 9, 10, 11, 12, 13, 14, 15, 16, 17, 18, 19, 20, 21, 25, 30, 35, 40, 45, 50, or more amino acid residues. In some embodiments, the linker is 3, 9, 16, or 21 amino acids in length. In some embodiments, the linker comprises a (GGGGS)ₙ (SEQ ID NO: 5), a (G)ₙ, an (EAAAK)ₙ (SEQ ID NO: 6), a (GGS)ₙ, an SGSETPGTSESATPES (SEQ ID NO: 7) (also referred to as XTEN), or an (XP)ₙ motif, or a combination of any of these, wherein n is independently an integer between 1 and 30. In some embodiments, wherein the linker comprises a (GGS)₃ motif or a SGSETPGTSESATPES (SEQ ID NO: 7) (XTEN) motif.

[0061] Some aspects of this disclosure provide fusion proteins comprising a Cas9 protein as provided herein that is fused to a second protein, thus forming a fusion protein. In some embodiments, the second protein is fused to the N-terminus of the Cas9 protein. In some embodiments, the second protein is fused to the C-terminus of the Cas9 protein. In some embodiments, the Cas9 domain and the effector domain are fused via a nuclear localization sequence (NLS), for example a NLS comprising the amino acid sequence PKKKRKV (SEQ ID NO: 299), MDSLLMNRRKFLYQFKNVRWAKGRRETYLC (SEQ ID NO: 300), or SPKKKRKVEAS (SEQ ID NO: 284). In some embodiments, a NLS may be combined with any of the linkers listed above.

[0062] In some embodiments, the effector domain comprises an enzymatic domain. In some embodiments, the effector domain comprises a nuclease, a nickase, a recombinase, a deaminase, a methyltransferase, a methylase, an acetylase, an acetyltransferase, a transcriptional activator, or a transcriptional repressor domain, which may have nuclease activity, nickase activity, recombinase activity, deaminase activity, methyltransferase activity, methylase activity, acetylase activity, acetyltransferase activity transcriptional activation activity or transcriptional repression activity, respectively. In some embodiments, the effector domain is a effector domain. In some embodiments, the effector domain is a deaminase domain. In some embodiments, the deaminase is a cytosine deaminase or a cytidine deaminase. In some embodiments, the deaminase is an apolipoprotein B mRNA-editing complex (APOBEC) family deaminase. In some embodiments, the deaminase is an APOBEC1 deaminase. In some embodiments, the deaminase is an APOBEC2 deaminase. In some embodiments, the deaminase is an APOBEC3 deaminase. In some embodiments, the deaminase is an APOBEC3A deaminase. In some embodiments, the deaminase is an APOBEC3D deaminase. In some embodiments, the deaminase is an APOBEC3E deaminase. In some embodiments, the deaminase is an APOBEC3F deaminase. In some embodiments, the deaminase is an APOBEC3G deaminase. In some embodiments, the deaminase is an APOBEC3H deaminase. In some embodiments, the deaminase is an APOBEC4 deaminase. In some embodiments, the deaminase is an activation-induced deaminase (AID). In some embodiments, the effector domain is at least 80%, at least 85%, at least 90%, at least 92%, at least 95%, at least 96%, at least 97%, at least 98%, at least 99%, or at least 99.5% identical to the deaminase domain of any one of SEQ ID NOs: 263-281. In some embodiments, the deaminase is a cytidine deaminase. In some embodiments, the deaminase is an apolipoprotein B mRNA-editing complex (APOBEC) family deaminase. In some embodiments, the deaminase is an APOBEC1 family deaminase. In some embodiments, the deaminase is an activation-induced cytidine deaminase (AID). In some embodiments, the deaminase is an ACF1/ASE deaminase. In some embodiments, the deaminase is an adenosine deaminase. In some embodiments, the deaminase is an ADAT family deaminase.

[0063] Some aspects of this disclosure provide fusion proteins comprising a Cas9 protein fused to a effector domain, e.g., a deaminase, and a uracil glycosylase inhibitor (UGI). Some aspects of this disclosure are based on the recognition that such fusion proteins may exhibit an increased nucleic acid editing efficiency as compared to fusion proteins not comprising an UGI domain. Domains such as the deaminase domains and UGI domains have been described and are within the scope of this disclosure. For example domains such as deaminase domains and UGI domains have been described in Provisional Application Nos. 62/245,828, filed Oct. 23, 2015, 62/279,346 filed Jan. 15, 2016, 62/311,763 filed Mar. 22, 2016, 62/322,178 filed Apr. 13, 2016, 62/357,352 filed Jun. 30, 2016, 62/370,700 filed Aug. 3, 2016, 62/398,490 filed Sep. 22, 2016, and 62/408,686 filed Oct. 14, 2016; the entire contents of each is incorporated by reference herein. It should be appreciated that the deaminase domains and UGI domains described in the foregoing references are within the scope of this disclosure and may be fused with any of the Cas9 proteisn provided herein.

[0064] In some embodiments, the effector domain of the fusion protein is a nuclease domain. In some embodiments, the nuclease domain is a FokI DNA cleavage domain. In some embodiments, the fusion protein dimerizes. In certain embodiments, the dimer of the fusion protein is active. For example, two Fokl DNA cleavage domains may dimerize to cleave a nucleic acid.

[0065] In some embodiments, the Cas9 protein is fused to a second Cas9 protein. In some embodiments, the second Cas9 protein is the Cas9 protein of any one of claims 1-345. In some embodiments, the second Cas9 protein is fused to the N-terminus of the fusion protein. In some embodiments, the second Cas9 protein is fused to the C-terminus of the fusion protein. In some embodiments, the Cas9 protein and the second Cas9 protein are fused via a second linker. In some embodiments, the second linker comprises a (GGGGS)ₙ (SEQ ID NO: 5), a (G)ₙ, an (EAAAK)ₙ(SEQ ID NO: 6), a (GGS)ₙ, an SGSETPGTSESATPES (SEQ ID NO: 7), or an (XP)ₙ motif, or a combination of any of these, wherein n is independently an integer between 1 and 30. In some embodiments, the second linker comprises a (GGS)₃ motif.

[0066] Some aspects of this disclosure provide complexes comprising a Cas9 protein, or a Cas9 fusion protein as provided herein, and a guide RNA bound to the Cas9 protein, or the Cas9 fusion protein.

[0067] In some embodiments, the target sequence is a DNA sequence. In some embodiments, the target sequence is a sequence in the genome of a mammal. In some embodiments, the target sequence is a sequence in the genome of a human. In some embodiments, the 3′-end of the target sequence is not immediately adjacent to the canonical PAM sequence (5′-NGG-3′).

[0068] Some aspects of this disclosure provide methods of using the Cas9 proteins, fusion proteins, or complexes provided herein. For example, some aspects of this disclosure provide methods comprising contacting a DNA molecule (a) with a Cas9 protein or a fusion protein as provided herein and a guide RNA, wherein the guide RNA is about 15-100 nucleotides long and comprises a sequence of at least 10 contiguous nucleotides that is complementary to a target sequence; or (b) with a Cas9 protein, a Cas9 fusion protein, or a Cas9 protein or fusion protein complex with a gRNA as provided herein. In some embodiments, the 3′-end of the target sequence is not immediately adjacent to the canonical PAM sequence (5′-NGG-3′). In some embodiments, the 3′-end of the target sequence is immediately adjacent to an AGC, GAG, TTT, GTG, or CAA sequence. In some embodiments, the target DNA sequence comprises a sequence associated with a disease or disorder. In some embodiments, the target DNA sequence comprises a point mutation associated with a disease or disorder. In some embodiments, the activity of the Cas9 protein, the Cas9 fusion protein, or the complex results in correction of the point mutation. In some embodiments, the step of contacting is performed in vivo in a subject.

[0069] Some aspects of this disclosure provide kits comprising a nucleic acid construct, comprising (a) a nucleotide sequence encoding a Cas9 protein or a Cas9 fusion protein as provided herein; and (b) a heterologous promoter that drives expression of the sequence of (a). In some embodiments, the kit further comprises an expression construct encoding a guide RNA backbone, wherein the construct comprises a cloning site positioned to allow the cloning of a nucleic acid sequence identical or complementary to a target sequence into the guide RNA backbone.

[0070] Some aspects of this disclosure provide polynucleotides encoding any of the Cas9 proteins, Cas9 fusion proteins, or guide RNA bound to the Cas9 protein or Cas9 fusion protein provided herein. Some aspects of this disclosure provide vectors comprising such polynucleotides. In some embodiments, the vector comprises a heterologous promoter driving expression of the polynucleotide.

[0071] Some aspects of this disclosure provide cells comprising any of the Cas9 proteins, fusion proteins, nucleic acid molecules, and/or a vectors as provided herein.

[0072] The summary above is meant to illustrate, in a non-limiting manner, some of the embodiments, advantages, features, and uses of the technology disclosed herein. Other embodiments, advantages, features, and uses of the technology disclosed herein will be apparent from the Detailed Description, the Drawings, the Examples, and the Claims.

### BRIEF DESCRIPTION OF THE DRAWINGS

[0073] FIG. 1 shows the activity of wild-type Streptococcus pyogenes Cas9 on canonical PAM libraries and non-canonical PAM libraries.

[0074] FIG. 2 shows the activity of exemplary evolved Cas9 clones on a PAM library after directed evolution.

[0075] FIG. 3 shows a comparison of wild-type and evolved Cas9 in a mammalian GFP activation assay.

[0076] FIGS. 4A to 4B show the binding activity of Cas9 (pJH306) and evolved Cas9 proteins with an 5′-NGG-3′ PAM sequence using GFP as a readout. On 5′-NGG-3′ PAMs, many of the evolved Cas9 proteins showed increased Cas9 binding activity relative to wild-type Cas9 based on an increase in GFP fluorescence signal. FIG. 4A is a graph representing Cas9 binding activity as a function of % cells above the background fluorescence. FIG. 4B is a graph showing Cas9 binding activity as a function of mean fluorescence. Cas9 proteins used in these experiments were dCas9 proteins fused to a VPR transcriptional activator.

[0077] FIGS. 5A to 5B show the binding activity of wild type dCas9-VPR (pJH306) and evolved dCas9-VPR proteins with an NNN PAM sequence using GFP as a readout. On a library of NNN PAMs, many of the evolved Cas9 proteins showed increased Cas9 binding activity relative to wild-type Cas9 based on an increase in GFP fluorescence signal. FIG. 5A is a graph representing Cas9 binding activity as a function of % cells above background fluorescence. FIG. 5B is a graph showing Cas9 binding activity as a function of mean fluorescence. Cas9 proteins used in these experiments were dCas9 proteins fused to VPR.

[0078] FIG. 6 shows dCas9-VPR on all 64 PAM sequences as demonstrated by mean fluorescence on transfected cells gated by iRFP fluorescence. WT dCas9-VPR is pJH306.

[0079] FIG. 7 shows in vitro cutting assay. On the gel, WT is wild-type Cas9 (SEQ ID NO: 9), and 1 is Cas9 (SEQ ID NO: 9) with the E1219V mutation.

[0080] FIG. 8 shows a Cas9 fusion protein that can be used to modulate PAM specificity. One possible configuration for a linked Cas9-dCas9 system that could be used for increasing Cas9 targeting to non-canonical PAMs is shown. dCas9 binding to 5′-NGG-3′ or another PAM could localize Cas9 to an area close to target 2. This localization could help Cas9 cut a previously inaccessible PAM.

[0081] FIGS. 9A to 9B show dCas9-VPR binding activity on the NNNNN PAM Library. FIG. 9A is a graph representing dCas9-VPR binding activity on the NNNNN PAM library as a function of the % cells above background fluorescence. FIG. 9B is a graph representing dCas9-VPR binding activity on the NNNNN PAM library as a function of mean fluorescence.

[0082] FIG. 10 shows Cas9 cutting activity using % of cells with GFP loss as a readout. Cas9 proteins were tested with two sgRNAs, which either targeted the canonical 5′-NGG-3′ PAM or a GAT PAM within a GFP gene.

[0083] FIG. 11 illustrates double-stranded DNA substrate bound by Cas9:DNA editing enzyme:sgRNA complexes. The DNA editing enzyme may be, without limitation, a nuclease, nickase, recombinase, deaminase, methyltransferase, methylase, acetylase, or acetyltransferase.

[0084] FIGS. 12A to 12D show the results of the PAM depletion assay. pJH760 was tested in the PAM depletion assay on four new targets: re2 (FIG. 12A), VEGF (FIG. 12B), CLTA (FIG. 12C), and CCR5D (FIG. 12D).

[0085] FIG. 13 shows GFP cutting in mammalian cells.

[0086] FIG. 14 shows the results of a PAM depletion assay to test pJH760 (xCas9 v1.0) on the re2 target.

[0087] FIG. 15 shows the results of a PAM depletion assay to test pJH760 (xCas9 v1.0) on the VEGF target.

[0088] FIG. 16 shows the results of a PAM depletion assay to test pJH760 (xCas9 v1.0) on the CLTA target.

[0089] FIG. 17 shows the results of a PAM depletion assay to test pJH760 (xCas9 v1.0) on the CCR5D target.

[0090] FIG. 18 shows the results of a PAM depletion assay to test four xCas9v3 mutants on the re2 target.

[0091] FIG. 19 shows the results of a PAM depletion assay to test four xCas9v3 mutants on the VEGF target.

[0092] FIG. 20 shows the results of a PAM depletion assay to test four xCas9v3 mutants on the CLTA target.

### DEFINITIONS

[0093] As used herein and in the claims, the singular forms “a,” “an,” and “the” include the singular and the plural reference unless the context clearly indicates otherwise. Thus, for example, a reference to “an agent” includes a single agent and a plurality of such agents.

[0094] The term “Cas9” or “Cas9 nuclease” refers to an RNA-guided nuclease comprising a Cas9 protein, or a fragment thereof (e.g., a protein comprising an active or inactive DNA cleavage domain of Cas9, and/or the gRNA binding domain of Cas9). A Cas9 nuclease is also referred to sometimes as a casn1 nuclease or a CRISPR (clustered regularly interspaced short palindromic repeat)-associated nuclease. CRISPR is an adaptive immune system that provides protection against mobile genetic elements (viruses, transposable elements and conjugative plasmids). CRISPR clusters contain spacers, sequences complementary to antecedent mobile elements, and target invading nucleic acids. CRISPR clusters are transcribed and processed into CRISPR RNA (crRNA). In type II CRISPR systems correct processing of pre-crRNA requires a trans-encoded small RNA (tracrRNA), endogenous ribonuclease 3 (rnc) and a Cas9 protein. The tracrRNA serves as a guide for ribonuclease 3-aided processing of pre-crRNA. Subsequently, Cas9/crRNA/tracrRNA endonucleolytically cleaves linear or circular dsDNA target complementary to the spacer. The target strand not complementary to crRNA is first cut endonucleolytically, then trimmed 3′-5′ exonucleolytically. In nature, DNA-binding and cleavage typically requires protein and both RNAs. However, single guide RNAs (“sgRNA”, or simply “gNRA”) can be engineered so as to incorporate aspects of both the crRNA and tracrRNA into a single RNA species. See, e.g., Jinek M., Chylinski K., Fonfara I., Hauer M., Doudna J. A., Charpentier E. Science 337:816-821(2012), the entire contents of which are hereby incorporated by reference. Cas9 recognizes a short motif in the CRISPR repeat sequences (the PAM or protospacer adjacent motif) to help distinguish self versus non-self. Cas9 nuclease sequences and structures are well known to those of skill in the art (see, e.g., “Complete genome sequence of an M1 strain of Streptococcus pyogenes.” Ferretti et al., J. J., McShan W. M., Ajdic D. J., Savic D. J., Savic G., Lyon K., Primeaux C., Sezate S., Suvorov A. N., Kenton S., Lai H. S., Lin S. P., Qian Y., Jia H. G., Najar F. Z., Ren Q., Zhu H., Song L., White J., Yuan X., Clifton S. W., Roe B. A., McLaughlin R. E., Proc. Natl. Acad. Sci. U.S.A. 98:4658-4663(2001); “CRISPR RNA maturation by trans-encoded small RNA and host factor RNase III.” Deltcheva E., Chylinski K., Sharma C. M., Gonzales K., Chao Y., Pirzada Z. A., Eckert M. R., Vogel J., Charpentier E., Nature 471:602-607(2011); and “A programmable dual-RNA-guided DNA endonuclease in adaptive bacterial immunity.” Jinek M., Chylinski K., Fonfara I., Hauer M., Doudna J. A., Charpentier E. Science 337:816-821(2012), the entire contents of each of which are incorporated herein by reference). Cas9 orthologs have been described in various species, including, but not limited to, S. pyogenes and S. thermophilus. Additional suitable Cas9 nucleases and sequences will be apparent to those of skill in the art based on this disclosure, and such Cas9 nucleases and sequences include Cas9 sequences from the organisms and loci disclosed in Chylinski, Rhun, and Charpentier, “The tracrRNA and Cas9 families of type II CRISPR-Cas immunity systems” (2013) RNA Biology 10:5, 726-737; the entire contents of which are incorporated herein by reference. In some embodiments, a Cas9 nuclease has an inactive (e.g., an inactivated) DNA cleavage domain.

[0095] A nuclease-inactivated Cas9 protein may interchangeably be referred to as a “dCas9” protein (for nuclease-“dead” Cas9). Methods for generating a Cas9 having an inactive DNA cleavage domain are known (See, e.g., Jinek et al., Science. 337:816-821(2012); Qi et al., “Repurposing CRISPR as an RNA-Guided Platform for Sequence-Specific Control of Gene Expression” (2013) Cell. 28; 152(5):1173-83, the entire contents of each of which are incorporated herein by reference). For example, the DNA cleavage domain of Cas9 is known to include two subdomains, the HNH nuclease subdomain and the RuvC1 subdomain. The HNH subdomain cleaves the strand complementary to the gRNA, whereas the RuvC1 subdomain cleaves the non-complementary strand. Mutations within these subdomains can silence the nuclease activity of Cas9. For example, the mutations D10A and H840A completely inactivate the nuclease activity of S. pyogenes Cas9 (Jinek et al., Science. 337:816-821(2012); Qi et al., Cell. 28; 152(5):1173-83 (2013).

[0096] In some embodiments, proteins comprising fragments of Cas9 are provided. For example, in some embodiments, a protein comprises one of two Cas9 domains: (1) the gRNA binding domain of Cas9; or (2) the DNA cleavage domain of Cas9. In some embodiments, proteins comprising Cas9 or fragments thereof are referred to as “Cas9 variants.” A Cas9 variant shares homology to Cas9. For example a Cas9 variant is at least about 70% identical, at least about 80% identical, at least about 90% identical, at least about 95% identical, at least about 96% identical, at least about 97% identical, at least about 98% identical, at least about 99% identical, at least about 99.5% identical, or at least about 99.9% to wild type Cas9. In some embodiments, the Cas9 variant comprises a fragment of Cas9 (e.g., a gRNA binding domain or a DNA-cleavage domain), such that the fragment is at least about 70% identical, at least about 80% identical, at least about 90% identical, at least about 95% identical, at least about 96% identical, at least about 97% identical, at least about 98% identical, at least about 99% identical, at least about 99.5% identical, or at least about 99.9% to the corresponding fragment of wild type Cas9. In some embodiments, wild type Cas9 corresponds to Cas9 from Streptococcus pyogenes (NCBI Reference Sequence: NC_017053.1, SEQ ID NO:1 (nucleotide); SEQ ID NO:2 (amino acid)).

(SEQ ID NO: 1)
ATGGATAAGAAATACTCAATAGGCTTAGATATCGGCACAAATAGCGTCG
GATGGGCGGTGATCACTGATGATTATAAGGTTCCGTCTAAAAAGTTCAA
GGTTCTGGGAAATACAGACCGCCACAGTATCAAAAAAAATCTTATAGGG
GCTCTTTTATTTGGCAGTGGAGAGACAGCGGAAGCGACTCGTCTCAAAC
GGACAGCTCGTAGAAGGTATACACGTCGGAAGAATCGTATTTGTTATCT
ACAGGAGATTTTTTCAAATGAGATGGCGAAAGTAGATGATAGTTTCTTT
CATCGACTTGAAGAGTCTTTTTTGGTGGAAGAAGACAAGAAGCATGAAC
GTCATCCTATTTTTGGAAATATAGTAGATGAAGTTGCTTATCATGAGAA
ATATCCAACTATCTATCATCTGCGAAAAAAATTGGCAGATTCTACTGAT
AAAGCGGATTTGCGCTTAATCTATTTGGCCTTAGCGCATATGATTAAGT
TTCGTGGTCATTTTTTGATTGAGGGAGATTTAAATCCTGATAATAGTGA
TGTGGACAAACTATTTATCCAGTTGGTACAAATCTACAATCAATTATTT
GAAGAAAACCCTATTAACGCAAGTAGAGTAGATGCTAAAGCGATTCTTT
CTGCACGATTGAGTAAATCAAGACGATTAGAAAATCTCATTGCTCAGCT
CCCCGGTGAGAAGAGAAATGGCTTGTTTGGGAATCTCATTGCTTTGTCA
TTGGGATTGACCCCTAATTTTAAATCAAATTTTGATTTGGCAGAAGATG
CTAAATTACAGCTTTCAAAAGATACTTACGATGATGATTTAGATAATTT
ATTGGCGCAAATTGGAGATCAATATGCTGATTTGTTTTTGGCAGCTAAG
AATTTATCAGATGCTATTTTACTTTCAGATATCCTAAGAGTAAATAGTG
AAATAACTAAGGCTCCCCTATCAGCTTCAATGATTAAGCGCTACGATGA
ACATCATCAAGACTTGACTCTTTTAAAAGCTTTAGTTCGACAACAACTT
CCAGAAAAGTATAAAGAAATCTTTTTTGATCAATCAAAAAACGGATATG
CAGGTTATATTGATGGGGGAGCTAGCCAAGAAGAATTTTATAAATTTAT
CAAACCAATTTTAGAAAAAATGGATGGTACTGAGGAATTATTGGTGAAA
CTAAATCGTGAAGATTTGCTGCGCAAGCAACGGACCTTTGACAACGGCT
CTATTCCCCATCAAATTCACTTGGGTGAGCTGCATGCTATTTTGAGAAG
ACAAGAAGACTTTTATCCATTTTTAAAAGACAATCGTGAGAAGATTGAA
AAAATCTTGACTTTTCGAATTCCTTATTATGTTGGTCCATTGGCGCGTG
GCAATAGTCGTTTTGCATGGATGACTCGGAAGTCTGAAGAAACAATTAC
CCCATGGAATTTTGAAGAAGTTGTCGATAAAGGTGCTTCAGCTCAATCA
TTTATTGAACGCATGACAAACTTTGATAAAAATCTTCCAAATGAAAAAG
TACTACCAAAACATAGTTTGCTTTATGAGTATTTTACGGTTTATAACGA
ATTGACAAAGGTCAAATATGTTACTGAGGGAATGCGAAAACCAGCATTT
CTTTCAGGTGAACAGAAGAAAGCCATTGTTGATTTACTCTTCAAAACAA
ATCGAAAAGTAACCGTTAAGCAATTAAAAGAAGATTATTTCAAAAAAAT
AGAATGTTTTGATAGTGTTGAAATTTCAGGAGTTGAAGATAGATTTAAT
GCTTCATTAGGCGCCTACCATGATTTGCTAAAAATTATTAAAGATAAAG
ATTTTTTGGATAATGAAGAAAATGAAGATATCTTAGAGGATATTGTTTT
AACATTGACCTTATTTGAAGATAGGGGGATGATTGAGGAAAGACTTAAA
ACATATGCTCACCTCTTTGATGATAAGGTGATGAAACAGCTTAAACGTC
GCCGTTATACTGGTTGGGGACGTTTGTCTCGAAAATTGATTAATGGTAT
TAGGGATAAGCAATCTGGCAAAACAATATTAGATTTTTTGAAATCAGAT
GGTTTTGCCAATCGCAATTTTATGCAGCTGATCCATGATGATAGTTTGA
CATTTAAAGAAGATATTCAAAAAGCACAGGTGTCTGGACAAGGCCATAG
TTTACATGAACAGATTGCTAACTTAGCTGGCAGTCCTGCTATTAAAAAA
GGTATTTTACAGACTGTAAAAATTGTTGATGAACTGGTCAAAGTAATGG
GGCATAAGCCAGAAAATATCGTTATTGAAATGGCACGTGAAAATCAGAC
AACTCAAAAGGGCCAGAAAAATTCGCGAGAGCGTATGAAACGAATCGAA
GAAGGTATCAAAGAATTAGGAAGTCAGATTCTTAAAGAGCATCCTGTTG
AAAATACTCAATTGCAAAATGAAAAGCTCTATCTCTATTATCTACAAAA
TGGAAGAGACATGTATGTGGACCAAGAATTAGATATTAATCGTTTAAGT
GATTATGATGTCGATCACATTGTTCCACAAAGTTTCATTAAAGACGATT
CAATAGACAATAAGGTACTAACGCGTTCTGATAAAAATCGTGGTAAATC
GGATAACGTTCCAAGTGAAGAAGTAGTCAAAAAGATGAAAAACTATTGG
AGACAACTTCTAAACGCCAAGTTAATCACTCAACGTAAGTTTGATAATT
TAACGAAAGCTGAACGTGGAGGTTTGAGTGAACTTGATAAAGCTGGTTT
TATCAAACGCCAATTGGTTGAAACTCGCCAAATCACTAAGCATGTGGCA
CAAATTTTGGATAGTCGCATGAATACTAAATACGATGAAAATGATAAAC
TTATTCGAGAGGTTAAAGTGATTACCTTAAAATCTAAATTAGTTTCTGA
CTTCCGAAAAGATTTCCAATTCTATAAAGTACGTGAGATTAACAATTAC
CATCATGCCCATGATGCGTATCTAAATGCCGTCGTTGGAACTGCTTTGA
TTAAGAAATATCCAAAACTTGAATCGGAGTTTGTCTATGGTGATTATAA
AGTTTATGATGTTCGTAAAATGATTGCTAAGTCTGAGCAAGAAATAGGC
AAAGCAACCGCAAAATATTTCTTTTACTCTAATATCATGAACTTCTTCA
AAACAGAAATTACACTTGCAAATGGAGAGATTCGCAAACGCCCTCTAAT
CGAAACTAATGGGGAAACTGGAGAAATTGTCTGGGATAAAGGGCGAGAT
TTTGCCACAGTGCGCAAAGTATTGTCCATGCCCCAAGTCAATATTGTCA
AGAAAACAGAAGTACAGACAGGCGGATTCTCCAAGGAGTCAATTTTACC
AAAAAGAAATTCGGACAAGCTTATTGCTCGTAAAAAAGACTGGGATCCA
AAAAAATATGGTGGTTTTGATAGTCCAACGGTAGCTTATTCAGTCCTAG
TGGTTGCTAAGGTGGAAAAAGGGAAATCGAAGAAGTTAAAATCCGTTAA
AGAGTTACTAGGGATCACAATTATGGAAAGAAGTTCCTTTGAAAAAAAT
CCGATTGACTTTTTAGAAGCTAAAGGATATAAGGAAGTTAAAAAAGACT
TAATCATTAAACTACCTAAATATAGTCTTTTTGAGTTAGAAAACGGTCG
TAAACGGATGCTGGCTAGTGCCGGAGAATTACAAAAAGGAAATGAGCTG
GCTCTGCCAAGCAAATATGTGAATTTTTTATATTTAGCTAGTCATTATG
AAAAGTTGAAGGGTAGTCCAGAAGATAACGAACAAAAACAATTGTTTGT
GGAGCAGCATAAGCATTATTTAGATGAGATTATTGAGCAAATCAGTGAA
TTTTCTAAGCGTGTTATTTTAGCAGATGCCAATTTAGATAAAGTTCTTA
GTGCATATAACAAACATAGAGACAAACCAATACGTGAACAAGCAGAAAA
TATTATTCATTTATTTACGTTGACGAATCTTGGAGCTCCCGCTGCTTTT
AAATATTTTGATACAACAATTGATCGTAAACGATATACGTCTACAAAAG
AAGTTTTAGATGCCACTCTTATCCATCAATCCATCACTGGTCTTTATGA
AACACGCATTGATTTGAGTCAGCTAGGAGGTGACTGA
(SEQ ID NO: 2)
MDKKYSIGLDIGTNSVGWAVITDDYKVPSKKFKVLGNTDRHSIKKNLIG
ALLFGSGETAEATRLKRTARRRYTRRKNRICYLQEIFSNEMAKVDDSFF
HRLEESFLVEEDKKHERHPIFGNIVDEVAYHEKYPTIYHLRKKLADSTD
KADLRLIYLALAHMIKFRGHFLIEGDLNPDNSDVDKLFIQLVQIYNQLF
EENPINASRVDAKAILSARLSKSRRLENLIAQLPGEKRNGLFGNLIALS
LGLTPNFKSNFDLAEDAKLQLSKDTYDDDLDNLLAQIGDQYADLFLAAK
NLSDAILLSDILRVNSEITKAPLSASMIKRYDEHHQDLTLLKALVRQQL
PEKYKEIFFDQSKNGYAGYIDGGASQEEFYKFIKPILEKMDGTEELLVK
LNREDLLRKQRTFDNGSIPHQIHLGELHAILRRQEDFYPFLKDNREKIE
KILTFRIPYYVGPLARGNSRFAWMTRKSEETITPWNFEEVVDKGASAQS
FIERMTNFDKNLPNEKVLPKHSLLYEYFTVYNELTKVKYVTEGMRKPAF
LSGEQKKAIVDLLFKTNRKVTVKQLKEDYFKKIECFDSVEISGVEDRFN
ASLGAYHDLLKIIKDKDFLDNEENEDILEDIVLTLTLFEDRGMIEERLK
TYAHLFDDKVMKQLKRRRYTGWGRLSRKLINGIRDKQSGKTILDFLKSD
GFANRNFMQLIHDDSLTFKEDIQKAQVSGQGHSLHEQIANLAGSPAIKK
GILQTVKIVDELVKVMGHKPENIVIEMARENQTTQKGQKNSRERMKRIE
EGIKELGSQILKEHPVENTQLQNEKLYLYYLQNGRDMYVDQELDINRLS
DYDVDHIVPQSFIKDDSIDNKVLTRSDKNRGKSDNVPSEEVVKKMKNYW
RQLLNAKLITQRKFDNLTKAERGGLSELDKAGFIKRQLVETRQITKHVA
QILDSRMNTKYDENDKLIREVKVITLKSKLVSDERKDFQFYKVREINNY
HHAHDAYLNAVVGTALIKKYPKLESEFVYGDYKVYDVRKMIAKSEQEIG
KATAKYFFYSNIMNFEKTEITLANGEIRKRPLIETNGETGEIVWDKGRD
FATVRKVLSMPQVNIVKKTEVQTGGFSKESILPKRNSDKLIARKKDWDP
KKYGGFDSPTVAYSVLVVAKVEKGKSKKLKSVKELLGITIMERSSFEKN
PIDFLEAKGYKEVKKDLIIKLPKYSLFELENGRKRMLASAGELQKGNEL
ALPSKYVNFLYLASHYEKLKGSPEDNEQKQLFVEQHKHYLDEIIEQISE
FSKRVILADANLDKVLSAYNKHRDKPIREQAENIIHLFTLTNLGAPAAF
KYFDTTIDRKRYTSTKEVLDATLIHQSITGLYETRIDLSQLGGD
(single underline: HNH domain; double underline:
RuvC domain)

[0097] In some embodiments, wild type Cas9 corresponds to, or comprises SEQ ID NO:3 (nucleotide) and/or SEQ ID NO: 4 (amino acid):

(SEQ ID NO: 3)
ATGGATAAAAAGTATTCTATTGGTTTAGACATCGGCACTAATTCCGTTG
GATGGGCTGTCATAACCGATGAATACAAAGTACCTTCAAAGAAATTTAA
GGTGTTGGGGAACACAGACCGTCATTCGATTAAAAAGAATCTTATCGGT
GCCCTCCTATTCGATAGTGGCGAAACGGCAGAGGCGACTCGCCTGAAAC
GAACCGCTCGGAGAAGGTATACACGTCGCAAGAACCGAATATGTTACTT
ACAAGAAATTTTTAGCAATGAGATGGCCAAAGTTGACGATTCTTTCTTT
CACCGTTTGGAAGAGTCCTTCCTTGTCGAAGAGGACAAGAAACATGAAC
GGCACCCCATCTTTGGAAACATAGTAGATGAGGTGGCATATCATGAAAA
GTACCCAACGATTTATCACCTCAGAAAAAAGCTAGTTGACTCAACTGAT
AAAGCGGACCTGAGGTTAATCTACTTGGCTCTTGCCCATATGATAAAGT
TCCGTGGGCACTTTCTCATTGAGGGTGATCTAAATCCGGACAACTCGGA
TGTCGACAAACTGTTCATCCAGTTAGTACAAACCTATAATCAGTTGTTT
GAAGAGAACCCTATAAATGCAAGTGGCGTGGATGCGAAGGCTATTCTTA
GCGCCCGCCTCTCTAAATCCCGACGGCTAGAAAACCTGATCGCACAATT
ACCCGGAGAGAAGAAAAATGGGTTGTTCGGTAACCTTATAGCGCTCTCA
CTAGGCCTGACACCAAATTTTAAGTCGAACTTCGACTTAGCTGAAGATG
CCAAATTGCAGCTTAGTAAGGACACGTACGATGACGATCTCGACAATCT
ACTGGCACAAATTGGAGATCAGTATGCGGACTTATTTTTGGCTGCCAAA
AACCTTAGCGATGCAATCCTCCTATCTGACATACTGAGAGTTAATACTG
AGATTACCAAGGCGCCGTTATCCGCTTCAATGATCAAAAGGTACGATGA
ACATCACCAAGACTTGACACTTCTCAAGGCCCTAGTCCGTCAGCAACTG
CCTGAGAAATATAAGGAAATATTCTTTGATCAGTCGAAAAACGGGTACG
CAGGTTATATTGACGGCGGAGCGAGTCAAGAGGAATTCTACAAGTTTAT
CAAACCCATATTAGAGAAGATGGATGGGACGGAAGAGTTGCTTGTAAAA
CTCAATCGCGAAGATCTACTGCGAAAGCAGCGGACTTTCGACAACGGTA
GCATTCCACATCAAATCCACTTAGGCGAATTGCATGCTATACTTAGAAG
GCAGGAGGATTTTTATCCGTTCCTCAAAGACAATCGTGAAAAGATTGAG
AAAATCCTAACCTTTCGCATACCTTACTATGTGGGACCCCTGGCCCGAG
GGAACTCTCGGTTCGCATGGATGACAAGAAAGTCCGAAGAAACGATTAC
TCCATGGAATTTTGAGGAAGTTGTCGATAAAGGTGCGTCAGCTCAATCG
TTCATCGAGAGGATGACCAACTTTGACAAGAATTTACCGAACGAAAAAG
TATTGCCTAAGCACAGTTTACTTTACGAGTATTTCACAGTGTACAATGA
ACTCACGAAAGTTAAGTATGTCACTGAGGGCATGCGTAAACCCGCCTTT
CTAAGCGGAGAACAGAAGAAAGCAATAGTAGATCTGTTATTCAAGACCA
ACCGCAAAGTGACAGTTAAGCAATTGAAAGAGGACTACTTTAAGAAAAT
TGAATGCTTCGATTCTGTCGAGATCTCCGGGGTAGAAGATCGATTTAAT
GCGTCACTTGGTACGTATCATGACCTCCTAAAGATAATTAAAGATAAGG
ACTTCCTGGATAACGAAGAGAATGAAGATATCTTAGAAGATATAGTGTT
GACTCTTACCCTCTTTGAAGATCGGGAAATGATTGAGGAAAGACTAAAA
ACATACGCTCACCTGTTCGACGATAAGGTTATGAAACAGTTAAAGAGGC
GTCGCTATACGGGCTGGGGACGATTGTCGCGGAAACTTATCAACGGGAT
AAGAGACAAGCAAAGTGGTAAAACTATTCTCGATTTTCTAAAGAGCGAC
GGCTTCGCCAATAGGAACTTTATGCAGCTGATCCATGATGACTCTTTAA
CCTTCAAAGAGGATATACAAAAGGCACAGGTTTCCGGACAAGGGGACTC
ATTGCACGAACATATTGCGAATCTTGCTGGTTCGCCAGCCATCAAAAAG
GGCATACTCCAGACAGTCAAAGTAGTGGATGAGCTAGTTAAGGTCATGG
GACGTCACAAACCGGAAAACATTGTAATCGAGATGGCACGCGAAAATCA
AACGACTCAGAAGGGGCAAAAAAACAGTCGAGAGCGGATGAAGAGAATA
GAAGAGGGTATTAAAGAACTGGGCAGCCAGATCTTAAAGGAGCATCCTG
TGGAAAATACCCAATTGCAGAACGAGAAACTTTACCTCTATTACCTACA
AAATGGAAGGGACATGTATGTTGATCAGGAACTGGACATAAACCGTTTA
TCTGATTACGACGTCGATCACATTGTACCCCAATCCTTTTTGAAGGACG
ATTCAATCGACAATAAAGTGCTTACACGCTCGGATAAGAACCGAGGGAA
AAGTGACAATGTTCCAAGCGAGGAAGTCGTAAAGAAAATGAAGAACTAT
TGGCGGCAGCTCCTAAATGCGAAACTGATAACGCAAAGAAAGTTCGATA
ACTTAACTAAAGCTGAGAGGGGTGGCTTGTCTGAACTTGACAAGGCCGG
ATTTATTAAACGTCAGCTCGTGGAAACCCGCCAAATCACAAAGCATGTT
GCACAGATACTAGATTCCCGAATGAATACGAAATACGACGAGAACGATA
AGCTGATTCGGGAAGTCAAAGTAATCACTTTAAAGTCAAAATTGGTGTC
GGACTTCAGAAAGGATTTTCAATTCTATAAAGTTAGGGAGATAAATAAC
TACCACCATGCGCACGACGCTTATCTTAATGCCGTCGTAGGGACCGCAC
TCATTAAGAAATACCCGAAGCTAGAAAGTGAGTTTGTGTATGGTGATTA
CAAAGTTTATGACGTCCGTAAGATGATCGCGAAAAGCGAACAGGAGATA
GGCAAGGCTACAGCCAAATACTTCTTTTATTCTAACATTATGAATTTCT
TTAAGACGGAAATCACTCTGGCAAACGGAGAGATACGCAAACGACCTTT
AATTGAAACCAATGGGGAGACAGGTGAAATCGTATGGGATAAGGGCCGG
GACTTCGCGACGGTGAGAAAAGTTTTGTCCATGCCCCAAGTCAACATAG
TAAAGAAAACTGAGGTGCAGACCGGAGGGTTTTCAAAGGAATCGATTCT
TCCAAAAAGGAATAGTGATAAGCTCATCGCTCGTAAAAAGGACTGGGAC
CCGAAAAAGTACGGTGGCTTCGATAGCCCTACAGTTGCCTATTCTGTCC
TAGTAGTGGCAAAAGTTGAGAAGGGAAAATCCAAGAAACTGAAGTCAGT
CAAAGAATTATTGGGGATAACGATTATGGAGCGCTCGTCTTTTGAAAAG
AACCCCATCGACTTCCTTGAGGCGAAAGGTTACAAGGAAGTAAAAAAGG
ATCTCATAATTAAACTACCAAAGTATAGTCTGTTTGAGTTAGAAAATGG
CCGAAAACGGATGTTGGCTAGCGCCGGAGAGCTTCAAAAGGGGAACGAA
CTCGCACTACCGTCTAAATACGTGAATTTCCTGTATTTAGCGTCCCATT
ACGAGAAGTTGAAAGGTTCACCTGAAGATAACGAACAGAAGCAACTTTT
TGTTGAGCAGCACAAACATTATCTCGACGAAATCATAGAGCAAATTTCG
GAATTCAGTAAGAGAGTCATCCTAGCTGATGCCAATCTGGACAAAGTAT
TAAGCGCATACAACAAGCACAGGGATAAACCCATACGTGAGCAGGCGGA
AAATATTATCCATTTGTTTACTCTTACCAACCTCGGCGCTCCAGCCGCA
TTCAAGTATTTTGACACAACGATAGATCGCAAACGATACACTTCTACCA
AGGAGGTGCTAGACGCGACACTGATTCACCAATCCATCACGGGATTATA
TGAAACTCGGATAGATTTGTCACAGCTTGGGGGTGACGGATCCCCCAAG
AAGAAGAGGAAAGTCTCGAGCGACTACAAAGACCATGACGGTGATTATA
AAGATCATGACATCGATTACAAGGATGACGATGACAAGGCTGCAGGA
(SEQ ID NO: 4)
MDKKYSIGLAIGTNSVGWAVITDEYKVPSKKFKVLGNTDRHSIKKNLIG
ALLFDSGETAEATRLKRTARRRYTRRKNRICYLQEIFSNEMAKVDDSFF
HRLEESFLVEEDKKHERHPIFGNIVDEVAYHEKYPTIYHLRKKLVDSTD
KADLRLIYLALAHMIKFRGHFLIEGDLNPDNSDVDKLFIQLVQTYNQLF
EENPINASGVDAKAILSARLSKSRRLENLIAQLPGEKKNGLFGNLIALS
LGLTPNFKSNFDLAEDAKLQLSKDTYDDDLDNLLAQIGDQYADLFLAAK
NLSDAILLSDILRVNTEITKAPLSASMIKRYDEHHQDLTLLKALVRQQL
PEKYKEIFFDQSKNGYAGYIDGGASQEEFYKFIKPILEKMDGTEELLVK
LNREDLLRKQRTFDNGSIPHQIHLGELHAILRRQEDFYPFLKDNREKIE
KILTFRIPYYVGPLARGNSRFAWMTRKSEETITPWNFEEVVDKGASAQS
FIERMTNFDKNLPNEKVLPKHSLLYEYFTVYNELTKVKYVTEGMRKPAF
LSGEQKKAIVDLLFKTNRKVTVKQLKEDYFKKIECFDSVEISGVEDRFN
ASLGTYHDLLKIIKDKDFLDNEENEDILEDIVLTLTLFEDREMIEERLK
TYAHLFDDKVMKQLKRRRYTGWGRLSRKLINGIRDKQSGKTILDFLKSD
GFANRNFMQLIHDDSLTFKEDIQKAQVSGQGDSLHEHIANLAGSPAIKK
GILQTVKVVDELVKVMGRHKPENIVIEMARENQTTQKGQKNSRERMKRI
EEGIKELGSQILKEHPVENTQLQNEKLYLYYLQNGRDMYVDQELDINRL
SDYDVDHIVPQSFLKDDSIDNKVLTRSDKNRGKSDNVPSEEVVKKMKNY
WRQLLNAKLITQRKFDNLTKAERGGLSELDKAGFIKRQLVETRQITKHV
AQILDSRMNTKYDENDKLIREVKVITLKSKLVSDFRKDFQFYKVREINN
YHHAHDAYLNAVVGTALIKKYPKLESEFVYGDYKVYDVRKMIAKSEQEI
GKATAKYFFYSNIMNFFKTEITLANGEIRKRPLIETNGETGEIVWDKGR
DFATVRKVLSMPQVNIVKKTEVQTGGFSKESILPKRNSDKLIARKKDWD
PKKYGGFDSPTVAYSVLVVAKVEKGKSKKLKSVKELLGITIMERSSFEK
NPIDFLEAKGYKEVKKDLIIKLPKYSLFELENGRKRMLASAGELQKGNE
LALPSKYVNFLYLASHYEKLKGSPEDNEQKQLFVEQHKHYLDEIIEQIS
EFSKRVILADANLDKVLSAYNKHRDKPIREQAENIIHLFTLTNLGAPAA
FKYFDTTIDRKRYTSTKEVLDATLIHQSITGLYETRIDLSQLGGD
(single underline: HNH domain; double underline:
RuvC domain)

[0098] In some embodiments, wild type Cas9 corresponds to Cas9 from Streptococcus pyogenes (NCBI Reference Sequence: NC_002737.2, SEQ ID NO: 282 (nucleotide); and Uniport Reference Sequence: Q99ZW2, SEQ ID NO: 9 (amino acid).

(SEQ ID NO: 282)
ATGGATAAGAAATACTCAATAGGCTTAGATATCGGCACAAATAGCGTCG
GATGGGCGGTGATCACTGATGAATATAAGGTTCCGTCTAAAAAGTTCAA
GGTTCTGGGAAATACAGACCGCCACAGTATCAAAAAAAATCTTATAGGG
GCTCTTTTATTTGACAGTGGAGAGACAGCGGAAGCGACTCGTCTCAAAC
GGACAGCTCGTAGAAGGTATACACGTCGGAAGAATCGTATTTGTTATCT
ACAGGAGATTTTTTCAAATGAGATGGCGAAAGTAGATGATAGTTTCTTT
CATCGACTTGAAGAGTCTTTTTTGGTGGAAGAAGACAAGAAGCATGAAC
GTCATCCTATTTTTGGAAATATAGTAGATGAAGTTGCTTATCATGAGAA
ATATCCAACTATCTATCATCTGCGAAAAAAATTGGTAGATTCTACTGAT
AAAGCGGATTTGCGCTTAATCTATTTGGCCTTAGCGCATATGATTAAGT
TTCGTGGTCATTTTTTGATTGAGGGAGATTTAAATCCTGATAATAGTGA
TGTGGACAAACTATTTATCCAGTTGGTACAAACCTACAATCAATTATTT
GAAGAAAACCCTATTAACGCAAGTGGAGTAGATGCTAAAGCGATTCTTT
CTGCACGATTGAGTAAATCAAGACGATTAGAAAATCTCATTGCTCAGCT
CCCCGGTGAGAAGAAAAATGGCTTATTTGGGAATCTCATTGCTTTGTCA
TTGGGTTTGACCCCTAATTTTAAATCAAATTTTGATTTGGCAGAAGATG
CTAAATTACAGCTTTCAAAAGATACTTACGATGATGATTTAGATAATTT
ATTGGCGCAAATTGGAGATCAATATGCTGATTTGTTTTTGGCAGCTAAG
AATTTATCAGATGCTATTTTACTTTCAGATATCCTAAGAGTAAATACTG
AAATAACTAAGGCTCCCCTATCAGCTTCAATGATTAAACGCTACGATGA
ACATCATCAAGACTTGACTCTTTTAAAAGCTTTAGTTCGACAACAACTT
CCAGAAAAGTATAAAGAAATCTTTTTTGATCAATCAAAAAACGGATATG
CAGGTTATATTGATGGGGGAGCTAGCCAAGAAGAATTTTATAAATTTAT
CAAACCAATTTTAGAAAAAATGGATGGTACTGAGGAATTATTGGTGAAA
CTAAATCGTGAAGATTTGCTGCGCAAGCAACGGACCTTTGACAACGGCT
CTATTCCCCATCAAATTCACTTGGGTGAGCTGCATGCTATTTTGAGAAG
ACAAGAAGACTTTTATCCATTTTTAAAAGACAATCGTGAGAAGATTGAA
AAAATCTTGACTTTTCGAATTCCTTATTATGTTGGTCCATTGGCGCGTG
GCAATAGTCGTTTTGCATGGATGACTCGGAAGTCTGAAGAAACAATTAC
CCCATGGAATTTTGAAGAAGTTGTCGATAAAGGTGCTTCAGCTCAATCA
TTTATTGAACGCATGACAAACTTTGATAAAAATCTTCCAAATGAAAAAG
TACTACCAAAACATAGTTTGCTTTATGAGTATTTTACGGTTTATAACGA
ATTGACAAAGGTCAAATATGTTACTGAAGGAATGCGAAAACCAGCATTT
CTTTCAGGTGAACAGAAGAAAGCCATTGTTGATTTACTCTTCAAAACAA
ATCGAAAAGTAACCGTTAAGCAATTAAAAGAAGATTATTTCAAAAAAAT
AGAATGTTTTGATAGTGTTGAAATTTCAGGAGTTGAAGATAGATTTAAT
GCTTCATTAGGTACCTACCATGATTTGCTAAAAATTATTAAAGATAAAG
ATTTTTTGGATAATGAAGAAAATGAAGATATCTTAGAGGATATTGTTTT
AACATTGACCTTATTTGAAGATAGGGAGATGATTGAGGAAAGACTTAAA
ACATATGCTCACCTCTTTGATGATAAGGTGATGAAACAGCTTAAACGTC
GCCGTTATACTGGTTGGGGACGTTTGTCTCGAAAATTGATTAATGGTAT
TAGGGATAAGCAATCTGGCAAAACAATATTAGATTTTTTGAAATCAGAT
GGTTTTGCCAATCGCAATTTTATGCAGCTGATCCATGATGATAGTTTGA
CATTTAAAGAAGACATTCAAAAAGCACAAGTGTCTGGACAAGGCGATAG
TTTACATGAACATATTGCAAATTTAGCTGGTAGCCCTGCTATTAAAAAA
GGTATTTTACAGACTGTAAAAGTTGTTGATGAATTGGTCAAAGTAATGG
GGCGGCATAAGCCAGAAAATATCGTTATTGAAATGGCACGTGAAAATCA
GACAACTCAAAAGGGCCAGAAAAATTCGCGAGAGCGTATGAAACGAATC
GAAGAAGGTATCAAAGAATTAGGAAGTCAGATTCTTAAAGAGCATCCTG
TTGAAAATACTCAATTGCAAAATGAAAAGCTCTATCTCTATTATCTCCA
AAATGGAAGAGACATGTATGTGGACCAAGAATTAGATATTAATCGTTTA
AGTGATTATGATGTCGATCACATTGTTCCACAAAGTTTCCTTAAAGACG
ATTCAATAGACAATAAGGTCTTAACGCGTTCTGATAAAAATCGTGGTAA
ATCGGATAACGTTCCAAGTGAAGAAGTAGTCAAAAAGATGAAAAACTAT
TGGAGACAACTTCTAAACGCCAAGTTAATCACTCAACGTAAGTTTGATA
ATTTAACGAAAGCTGAACGTGGAGGTTTGAGTGAACTTGATAAAGCTGG
TTTTATCAAACGCCAATTGGTTGAAACTCGCCAAATCACTAAGCATGTG
GCACAAATTTTGGATAGTCGCATGAATACTAAATACGATGAAAATGATA
AACTTATTCGAGAGGTTAAAGTGATTACCTTAAAATCTAAATTAGTTTC
TGACTTCCGAAAAGATTTCCAATTCTATAAAGTACGTGAGATTAACAAT
TACCATCATGCCCATGATGCGTATCTAAATGCCGTCGTTGGAACTGCTT
TGATTAAGAAATATCCAAAACTTGAATCGGAGTTTGTCTATGGTGATTA
TAAAGTTTATGATGTTCGTAAAATGATTGCTAAGTCTGAGCAAGAAATA
GGCAAAGCAACCGCAAAATATTTCTTTTACTCTAATATCATGAACTTCT
TCAAAACAGAAATTACACTTGCAAATGGAGAGATTCGCAAACGCCCTCT
AATCGAAACTAATGGGGAAACTGGAGAAATTGTCTGGGATAAAGGGCGA
GATTTTGCCACAGTGCGCAAAGTATTGTCCATGCCCCAAGTCAATATTG
TCAAGAAAACAGAAGTACAGACAGGCGGATTCTCCAAGGAGTCAATTTT
ACCAAAAAGAAATTCGGACAAGCTTATTGCTCGTAAAAAAGACTGGGAT
CCAAAAAAATATGGTGGTTTTGATAGTCCAACGGTAGCTTATTCAGTCC
TAGTGGTTGCTAAGGTGGAAAAAGGGAAATCGAAGAAGTTAAAATCCGT
TAAAGAGTTACTAGGGATCACAATTATGGAAAGAAGTTCCTTTGAAAAA
AATCCGATTGACTTTTTAGAAGCTAAAGGATATAAGGAAGTTAAAAAAG
ACTTAATCATTAAACTACCTAAATATAGTCTTTTTGAGTTAGAAAACGG
TCGTAAACGGATGCTGGCTAGTGCCGGAGAATTACAAAAAGGAAATGAG
CTGGCTCTGCCAAGCAAATATGTGAATTTTTTATATTTAGCTAGTCATT
ATGAAAAGTTGAAGGGTAGTCCAGAAGATAACGAACAAAAACAATTGTT
TGTGGAGCAGCATAAGCATTATTTAGATGAGATTATTGAGCAAATCAGT
GAATTTTCTAAGCGTGTTATTTTAGCAGATGCCAATTTAGATAAAGTTC
TTAGTGCATATAACAAACATAGAGACAAACCAATACGTGAACAAGCAGA
AAATATTATTCATTTATTTACGTTGACGAATCTTGGAGCTCCCGCTGCT
TTTAAATATTTTGATACAACAATTGATCGTAAACGATATACGTCTACAA
AAGAAGTTTTAGATGCCACTCTTATCCATCAATCCATCACTGGTCTTTA
TGAAACACGCATTGATTTGAGTCAGCTAGGAGGTGACTGA
(SEQ ID NO: 9)
MDKKYSIGLDIGTNSVGWAVITDEYKVPSKKFKVLGNTDRHSIKKNLIG
ALLFDSGETAEATRLKRTARRRYTRRKNRICYLQEIFSNEMAKVDDSFF
HRLEESFLVEEDKKHERHPIFGNIVDEVAYHEKYPTIYHLRKKLVDSTD
KADLRLIYLALAHMIKFRGHFLIEGDLNPDNSDVDKLFIQLVQTYNQLF
EENPINASGVDAKAILSARLSKSRRLENLIAQLPGEKKNGLFGNLIALS
LGLTPNFKSNFDLAEDAKLQLSKDTYDDDLDNLLAQIGDQYADLFLAAK
NLSDAILLSDILRVNTEITKAPLSASMIKRYDEHHQDLTLLKALVRQQL
PEKYKEIFFDQSKNGYAGYIDGGASQEEFYKFIKPILEKMDGTEELLVK
LNREDLLRKQRTFDNGSIPHQIHLGELHAILRRQEDFYPFLKDNREKIE
KILTFRIPYYVGPLARGNSRFAWMTRKSEETITPWNFEEVVDKGASAQS
FIERMTNFDKNLPNEKVLPKHSLLYEYFTVYNELTKVKYVTEGMRKPAF
LSGEQKKAIVDLLFKTNRKVTVKQLKEDYFKKIECFDSVEISGVEDRFN
ASLGTYHDLLKIIKDKDFLDNEENEDILEDIVLTLTLFEDREMIEERLK
TYAHLFDDKVMKQLKRRRYTGWGRLSRKLINGIRDKQSGKTILDFLKSD
GFANRNFMQLIHDDSLTFKEDIQKAQVSGQGDSLHEHIANLAGSPAIKK
GILQTVKVVDELVKVMGRHKPENIVIEMARENQTTQKGQKNSRERMKRI
EEGIKELGSQILKEHPVENTQLQNEKLYLYYLQNGRDMYVDQELDINRL
SDYDVDHIVPQSFLKDDSIDNKVLTRSDKNRGKSDNVPSEEVVKKMKNY
WRQLLNAKLITQRKFDNLTKAERGGLSELDKAGFIKRQLVETRQITKHV
AQILDSRMNTKYDENDKLIREVKVITLKSKLVSDERKDFQFYKVREINN
YHHAHDAYLNAVVGTALIKKYPKLESEFVYGDYKVYDVRKMIAKSEQEI
GKATAKYFFYSNIMNFFKTEITLANGEIRKRPLIEINGETGEIVWDKGR
DFATVRKVLSMPQVNIVKKTEVQTGGFSKESILPKRNSDKLIARKKDWD
PKKYGGFDSPTVAYSVLVVAKVEKGKSKKLKSVKELLGITIMERSSFEK
NPIDFLEAKGYKEVKKDLIIKLPKYSLFELENGRKRMLASAGELQKGNE
LALPSKYVNFLYLASHYEKLKGSPEDNEQKQLFVEQHKHYLDEIIEQIS
EFSKRVILADANLDKVLSAYNKHRDKPIREQAENIIHLFTLTNLGAPAA
FKYFDTTIDRKRYTSTKEVLDATLIHQSITGLYETRIDLSQLGGD
(single underline: HNH domain; double underline:
RuvC domain)

[0099] In some embodiments, Cas9 refers to Cas9 from: Corynebacterium ulcerans (NCBI Refs: NC_015683.1, NC_017317.1); Corynebacterium diphtheria (NCBI Refs: NC_016782.1, NC_016786.1); Spiroplasma syrphidicola (NCBI Ref: NC_021284.1); Prevotella intermedia (NCBI Ref: NC_017861.1); Spiroplasma taiwanense (NCBI Ref: NC_021846.1); Streptococcus iniae (NCBI Ref: NC_021314.1); Belliella baltica (NCBI Ref: NC_018010.1); Psychroflexus torquisI (NCBI Ref: NC_018721.1); Streptococcus thermophilus (NCBI Ref: YP_820832.1); Listeria innocua (NCBI Ref: NP_472073.1); Campylobacter jejuni (NCBI Ref: YP_002344900.1); or Neisseria. meningitidis (NCBI Ref: YP_002342100.1) or to a Cas9 from any of the organisms listed in Example 3.

[0100] In some embodiments, dCas9 corresponds to, or comprises in part or in whole, a Cas9 amino acid sequence having one or more mutations that inactivate the Cas9 nuclease activity. For example, in some embodiments, a dCas9 domain comprises D10A and/or H840A mutation.

dCas9 (D10A and H840A):
(SEQ ID NO: 8)
MDKKYSIGLA*IGTNSVGWAVITDEYKVPSKKFKVLGNTDRHSIKKNLIGALLFDSGETAEATRLKRTARRRYTR
RKNRICYLQEIFSNEMAKVDDSFFHRLEESFLVEEDKKHERHPIFGNI*VDEVAYHEKYPTIYH*LRKKLVDSTD
KADLRLIYLALAHMIKFRGHFLIEGDLNPDNSDVD*KLFIQLVQTYNQLFEENPINASGVDAKAILSARLSKSRR
LENLIAQLPGEKKNGLFGNLIALSLGLTPNFKSNFDLAEDA*KLQLSKDTYDDDLDNLLAQIGDQYADLFLAAK*
NLSDAILLSDILRVNTEITKAPLSASMIKRYDEHHQDLTLLKALVRQQLPEKYKEIFFDQSKNGYAGYIDGGASQ
EEFYKFIKPILEKMDGTEELLVKLNREDLLRKQRTFDNGS*IPHQIHLGELHAILRRQEDFYPFLKDNREKIEKI
LTFRIPYYVGPLARGNSRFAWMTRKSEETITPWNFEE*VVDKGASAQSFIERMTNFDKNLPNEKVLPKHSLLYEY
FTVYNELTKVKYVTEGMRKPAFLSGE*QKKAIVDLLFKTNRKVTVKQLKEDYFKKIECFDSVEISGVEDRFNASL
GTYHDLLKIIKDKDFLDNEENEDILEDIVLTLTLFEDREMIEERLKTYAHLFDDKVMKQLKRRRYTGWG*RLSRK

[chemical structure]

[chemical structure]

LQNGRDMYVDQELDINRLSDYDVDAIVPQSFLKDDSIDNKVLTRSDKNRGKSDNVPSEEVVKKMKNYWRQLLNAK

[chemical structure]

[chemical structure]

[chemical structure]

SDKLIARKKDWDPKKYGGFDSPTVAYSVLVVAKVEKGKSKKLKSVKELLGITIMERSSFEKNPIDFLEAKGYKEV
KKDLIIKLPKYSLFELENGRKRMLASAGELQKGNELALPSKYVNFLYLASHYEKLKGSPEDNEQKQLFVEQHKHY
LDEIIEQISEFSKRVILADANLDKVLSAYNKHRDKPIREQAENIIHLFTLINLGAPAAFKYFDTTIDRKRYTSTK
EVLDATLIHQSITGLYETRIDLSQLGGD
(single underline: HNH domain; double underline: RuvC domain)

[0101] In some embodiments, Cas9 corresponds to, or comprises in part or in whole, a Cas9 amino acid sequence having one or more mutations that alter Cas9's nuclease activity. In some embodiments, Cas9 may be a Cas9 nickase, which is a version of Cas9 that generates a single-stranded DNA break at a specific location based on a co-expressed gRNA-defined target sequence, rather than a double-strand DNA break. For example, in some embodiments, a Cas9 domain comprises D10A mutation (e.g., SEQ ID NO: 301) and/or an H840A mutation (e.g., SEQ ID NO: 302). Exemplary Cas9 nickases are shown below. However, it should be appreciated that additional Cas9 nickases that generate a single-stranded DNA break of a DNA duplex would be apparent to the skilled artisan and are within the scope of this disclosure.

Cas9 D10A nickase:
(SEQ ID NO: 301)
MDKKYSIGLAIGINSVGWAVITDEYKVPSKKEKVLGNTDRHSIKKNLIG
ALLFDSGETAEATRLKRTARRRYTRRKNRICYLQEIFSNEMAKVDDSFF
HRLEESFLVEEDKKHERHPIFGNIVDEVAYHEKYPTIYHLRKKLVDSTD
KADLRLIYLALAHMIKFRGHFLIEGDLNPDNSDVDKLFIQLVQTYNQLF
EENPINASGVDAKAILSARLSKSRRLENLIAQLPGEKKNGLFGNLIALS
LGLTPNFKSNFDLAEDAKLQLSKDTYDDDLDNLLAQIGDQYADLFLAAK
NLSDAILLSDILRVNTEITKAPLSASMIKRYDEHHQDLTLLKALVRQQL
PEKYKEIFFDQSKNGYAGYIDGGASQEEFYKFIKPILEKMDGTEELLVK
LNREDLLRKQRTFDNGSIPHQIHLGELHAILRRQEDFYPFLKDNREKIE
KILTFRIPYYVGPLARGNSRFAWMTRKSEETITPWNFEEVVDKGASAQS
FIERMTNFDKNLPNEKVLPKHSLLYEYFTVYNELTKVKYVTEGMRKPAF
LSGEQKKAIVDLLFKTNRKVTVKQLKEDYFKKIECFDSVEISGVEDRFN
ASLGTYHDLLKIIKDKDFLDNEENEDILEDIVLTLTLFEDREMIEERLK
TYAHLFDDKVMKQLKRRRYTGWGRLSRKLINGIRDKQSGKTILDFLKSD
GFANRNFMQLIHDDSLTFKEDIQKAQVSGQGDSLHEHIANLAGSPAIKK
GILQTVKVVDELVKVMGRHKPENIVIEMARENQTTQKGQKNSRERMKRI
EEGIKELGSQILKEHPVENTQLQNEKLYLYYLQNGRDMYVDQELDINRL
SDYDVDHIVPQSFLKDDSIDNKVLTRSDKNRGKSDNVPSEEVVKKMKNY
WRQLLNAKLITQRKFDNLTKAERGGLSELDKAGFIKRQLVETRQITKHV
AQILDSRMNTKYDENDKLIREVKVITLKSKLVSDFRKDFQFYKVREINN
YHHAHDAYLNAVVGTALIKKYPKLESEFVYGDYKVYDVRKMIAKSEQEI
GKATAKYFFYSNIMNFFKTEITLANGEIRKRPLIETNGETGEIVWDKGR
DFATVRKVLSMPQVNIVKKTEVQTGGFSKESILPKRNSDKLIARKKDWD
PKKYGGFDSPTVAYSVLVVAKVEKGKSKKLKSVKELLGITIMERSSFEK
NPIDFLEAKGYKEVKKDLIIKLPKYSLFELENGRKRMLASAGELQKGNE
LALPSKYVNFLYLASHYEKLKGSPEDNEQKQLFVEQHKHYLDEIIEQIS
EFSKRVILADANLDKVLSAYNKHRDKPIREQAENIIHLFTLTNLGAPAA
FKYFDTTIDRKRYTSTKEVLDATLIHQSITGLYETRIDLSQLGGD
(single underline: HNH domain; double underline:
RuvC domain)
Cas9 H840Anickase:
(SEQ ID NO: 302)
MDKKYSIGLDIGINSVGWAVITDEYKVPSKKEKVLGNTDRHSIKKNLIG
ALLFDSGETAEATRLKRTARRRYTRRKNRICYLQEIFSNEMAKVDDSFF
HRLEESFLVEEDKKHERHPIFGNIVDEVAYHEKYPTIYHLRKKLVDSTD
KADLRLIYLALAHMIKFRGHFLIEGDLNPDNSDVDKLFIQLVQTYNQLF
EENPINASGVDAKAILSARLSKSRRLENLIAQLPGEKKNGLFGNLIALS
LGLTPNFKSNEDLAEDAKLQLSKDTYDDDLDNLLAQIGDQYADLFLAAK
NLSDAILLSDILRVNTEITKAPLSASMIKRYDEHHQDLTLLKALVRQQL
PEKYKEIFFDQSKNGYAGYIDGGASQEEFYKFIKPILEKMDGTEELLVK
LNREDLLRKQRTFDNGSIPHQIHLGELHAILRRQEDFYPFLKDNREKIE
KILTFRIPYYVGPLARGNSRFAWMTRKSEETITPWNFEEVVDKGASAQS
FIERMTNEDKNLPNEKVLPKHSLLYEYFTVYNELTKVKYVTEGMRKPAE
LSGEQKKAIVDLLFKTNRKVTVKQLKEDYFKKIECFDSVEISGVEDRFN
ASLGTYHDLLKIIKDKDFLDNEENEDILEDIVLTLTLFEDREMIEERLK
TYAHLFDDKVMKQLKRRRYTGWGRLSRKLINGIRDKQSGKTILDFLKSD
GFANRNFMQLIHDDSLTFKEDIQKAQVSGQGDSLHEHIANLAGSPAIKK
GILQTVKVVDELVKVMGRHKPENIVIEMARENQTTQKGQKNSRERMKRI
EEGIKELGSQILKEHPVENTQLQNEKLYLYYLQNGRDMYVDQELDINRL
SDYDVDAIVPQSFLKDDSIDNKVLTRSDKNRGKSDNVPSEEVVKKMKNY
WRQLLNAKLITQRKFDNLTKAERGGLSELDKAGFIKRQLVETRQITKHV
AQILDSRMNTKYDENDKLIREVKVITLKSKLVSDERKDFQFYKVREINN
YHHAHDAYLNAVVGTALIKKYPKLESEFVYGDYKVYDVRKMIAKSEQEI
GKATAKYFFYSNIMNFFKTEITLANGEIRKRPLIEINGETGEIVWDKGR
DFATVRKVLSMPQVNIVKKTEVQTGGFSKESILPKRNSDKLIARKKDWD
PKKYGGFDSPTVAYSVLVVAKVEKGKSKKLKSVKELLGITIMERSSFEK
NPIDFLEAKGYKEVKKDLIIKLPKYSLFELENGRKRMLASAGELQKGNE
LALPSKYVNFLYLASHYEKLKGSPEDNEQKQLFVEQHKHYLDEIIEQIS
EFSKRVILADANLDKVLSAYNKHRDKPIREQAENIIHLFTLTNLGAPAA
FKYFDTTIDRKRYTSTKEVLDATLIHQSITGLYETRIDLSQLGGD
(single underline: HNH domain; double underline:
RuvC domain)

[0102] In other embodiments, dCas9 variants having mutations other than D10A and H840A are provided, which, e.g., result in nuclease-inactivated Cas9 (dCas9). Such mutations, by way of example, include other amino acid substitutions at D10 and H820, or other substitutions within the nuclease domains of Cas9 (e.g., substitutions in the HNH nuclease subdomain and/or the RuvC1 subdomain). In some embodiments, variants or homologues of dCas9 (e.g., variants of SEQ ID NO: 9) are provided which are at least about 70% identical, at least about 80% identical, at least about 90% identical, at least about 95% identical, at least about 98% identical, at least about 99% identical, at least about 99.5% identical, or at least about 99.9% identical to SEQ ID NO: 9. In some embodiments, variants of dCas9 (e.g., variants of SEQ ID NO: 9) are provided having amino acid sequences which are shorter, or longer than SEQ ID NO: 9, by about 5 amino acids, by about 10 amino acids, by about 15 amino acids, by about 20 amino acids, by about 25 amino acids, by about 30 amino acids, by about 40 amino acids, by about 50 amino acids, by about 75 amino acids, by about 100 amino acids, or more.

[0103] In some embodiments, Cas9 fusion proteins as provided herein comprise the full-length amino acid sequence of a Cas9 protein, e.g., one of the sequences provided above. In other embodiments, however, fusion proteins as provided herein do not comprise a full-length Cas9 sequence, but only a fragment thereof. For example, in some embodiments, a Cas9 fusion protein provided herein comprises a Cas9 fragment, wherein the fragment binds crRNA and tracrRNA or a sgRNA, but does not comprise a functional nuclease domain, e.g., it comprises only a truncated version of a nuclease domain or no nuclease domain at all. Exemplary amino acid sequences of suitable Cas9 domains and Cas9 fragments are provided herein, and additional suitable sequences of Cas9 domains and Cas9 fragments will be apparent to those of skill in the art. In some embodiments, a Cas9 fragment is at least 30%, at least 35%, at least 40%, at least 45%, at least 50%, at least 55%, at least 60%, at least 65%, at least 70%, at least 75%, at least 80%, at least 85%, at least 90%, at least 95% identical, at least 96%, at least 97%, at least 98%, at least 99%, or at least 99.5% of the amino acid length of a corresponding wild type Cas9 protein. In some embodiments, a Cas9 fragment comprises at least at least 100 amino acids in length. In some embodiments, the Cas9 fragment is at least 100, 150, 200, 250, 300, 350, 400, 450, 500, 550, 600, 650, 700, 750, 800, 850, 900, 950, 1000, 1050, 1100, 1150, 1200, 1250, 1300, 1350, 1400, 1450, 1500, 1550, or at least 1600 amino acids of a corresponding wild type Cas9 protein. In some embodiments, the Cas9 fragment comprises an amino acid sequence that has at least 10, at least 15, at least 20, at least 30, at leat 40, at least 50, at least 60, at least 70, at least 80, at least 90, at least 100, at least 150, at least 200, at least 250, at least 300, at least 350, at least 400, at least 500, at least 600, at least 700, at least 800, at least 900, at least 1000, at least 1100, or at least 1200 identical contiguous amino acid residues of a corresponding wild type Cas9 protein.

[0104] Cas9. In some embodiments, Cas9 refers to Cas9 from: Corynebacterium ulcerans (NCBI Refs: NC_015683.1, NC_017317.1); Corynebacterium diphtheria (NCBI Refs: NC_016782.1, NC_016786.1); Spiroplasma syrphidicola (NCBI Ref: NC_021284.1); Prevotella intermedia (NCBI Ref: NC_017861.1); Spiroplasma taiwanense (NCBI Ref: NC_021846.1); Streptococcus iniae (NCBI Ref: NC_021314.1); Belliella baltica (NCBI Ref: NC_018010.1); Psychroflexus torquisI (NCBI Ref: NC_018721.1); Streptococcus thermophilus (NCBI Ref: YP_820832.1); Listeria innocua (NCBI Ref: NP_472073.1); Campylobacter jejuni (NCBI Ref: YP_002344900.1); or Neisseria. meningitidis (NCBI Ref: YP_002342100.1).

[0105] The term “deaminase” or “deaminase domain,” as used herein, refers to a protein or enzyme that catalyzes a deamination reaction. In some embodiments, the deaminase or deaminase domain is a cytidine deaminase, catalyzing the hydrolytic deamination of cytidine or deoxycytidine to uridine or deoxyuridine, respectively. In some embodiments, the deaminase or deaminase domain is a cytosine deaminase, catalyzing the hydrolytic deamination of cytosine to uracil. In some embodiments, the deaminase or deaminase domain is a naturally-occurring deaminase from an organism, such as a human, chimpanzee, gorilla, monkey, cow, dog, rat, or mouse. In some embodiments, the deaminase or deaminase domain is a variant of a naturally-occuring deaminase from an organism, that does not occur in nature. For example, in some embodiments, the deaminase or deaminase domain is at least 50%, at least 55%, at least 60%, at least 65%, at least 70%, at least 75% at least 80%, at least 85%, at least 90%, at least 95%, at least 96%, at least 97%, at least 98%, at least 99%, or at least 99.5% identical to a naturally-occuring deaminase from an organism.

[0106] The term “effective amount,” as used herein, refers to an amount of a biologically active agent that is sufficient to elicit a desired biological response. For example, in some embodiments, an effective amount of a nuclease may refer to the amount of the nuclease that is sufficient to induce cleavage of a target site specifically bound and cleaved by the nuclease. In some embodiments, an effective amount of a fusion protein provided herein, e.g., of a fusion protein comprising a nuclease-inactive Cas9 domain and a effector domain (e.g., a deaminase domain) may refer to the amount of the fusion protein that is sufficient to induce editing of a target site specifically bound and edited by the fusion protein. As will be appreciated by the skilled artisan, the effective amount of an agent, e.g., a fusion protein, a nuclease, a deaminase, a recombinase, a hybrid protein, a protein dimer, a complex of a protein (or protein dimer) and a polynucleotide, or a polynucleotide, may vary depending on various factors such as, for example, on the desired biological response, e.g., on the specific allele, genome, or target site to be edited; on the cell or tissue being targeted; and on the agent being used.

[0107] The term “immediately adjacent” as used in the context of two nucleic acid sequences refers to two sequences that directly abut each other as part of the same nucleic acid molecule and are not separated by one or more nucleotides. Accordingly, sequences are immediately adjacent, when the nucleotide at the 3′-end of one of the sequences is directly connected to nucleotide at the 5′-end of the other sequence via a phosphodiester bond.

[0108] The term “linker,” as used herein, refers to a chemical group or a molecule linking two molecules or moieties, e.g., two domains of a fusion protein, such as, for example, a nuclease-inactive Cas9 domain and a effector domain (e.g., a deaminase domain). In some embodiments, a linker joins a gRNA binding domain of an RNA-programmable nuclease, including a Cas9 nuclease domain, and the catalytic domain of a nucleic-acid editing protein. In some embodiments, a linker joins a dCas9 and a nucleic-acid editing protein. Typically, the linker is positioned between, or flanked by, two groups, molecules, or other moieties and connected to each one via a covalent bond, thus connecting the two. In some embodiments, the linker is an amino acid or a plurality of amino acids (e.g., a peptide or protein). In some embodiments, the linker is an organic molecule, group, polymer, or chemical moiety. In some embodiments, the linker is 5-100 amino acids in length, for example, 5, 6, 7, 8, 9, 10, 11, 12, 13, 14, 15, 16, 17, 18, 19, 20, 21, 22, 23, 24, 25, 26, 27, 28, 29, 30, 30-35, 35-40, 40-45, 45-50, 50-60, 60-70, 70-80, 80-90, 90-100, 100-150, or 150-200 amino acids in length. Longer or shorter linkers are also contemplated.

[0109] The term “mutation,” as used herein, refers to a substitution of a residue within a sequence, e.g., a nucleic acid or amino acid sequence, with another residue, or a deletion or insertion of one or more residues within a sequence. Mutations are typically described herein by identifying the original residue followed by the position of the residue within the sequence and by the identity of the newly substituted residue. Various methods for making the amino acid substitutions (mutations) provided herein are well known in the art, and are provided by, for example, Green and Sambrook, Molecular Cloning: A Laboratory Manual (4^{th} ed., Cold Spring Harbor Laboratory Press, Cold Spring Harbor, N.Y. (2012)).

[0110] The terms “nucleic acid” and “nucleic acid molecule,” as used herein, refer to a compound comprising a nucleobase and an acidic moiety, e.g., a nucleoside, a nucleotide, or a polymer of nucleotides. Typically, polymeric nucleic acids, e.g., nucleic acid molecules comprising three or more nucleotides are linear molecules, in which adjacent nucleotides are linked to each other via a phosphodiester linkage. In some embodiments, “nucleic acid” refers to individual nucleic acid residues (e.g. nucleotides and/or nucleosides). In some embodiments, “nucleic acid” refers to an oligonucleotide chain comprising three or more individual nucleotide residues. As used herein, the terms “oligonucleotide” and “polynucleotide” can be used interchangeably to refer to a polymer of nucleotides (e.g., a string of at least three nucleotides). In some embodiments, “nucleic acid” encompasses RNA as well as single and/or double-stranded DNA. Nucleic acids may be naturally occurring, for example, in the context of a genome, a transcript, mRNA, tRNA, rRNA, siRNA, snRNA, a plasmid, cosmid, chromosome, chromatid, or other naturally occurring nucleic acid molecule. On the other hand, a nucleic acid molecule may be a non-naturally occurring molecule, e.g., a recombinant DNA or RNA, an artificial chromosome, an engineered genome, or fragment thereof, or a synthetic DNA, RNA, DNA/RNA hybrid, or including non-naturally occurring nucleotides or nucleosides. Furthermore, the terms “nucleic acid,” “DNA,” “RNA,” and/or similar terms include nucleic acid analogs, e.g., analogs having other than a phosphodiester backbone. Nucleic acids can be purified from natural sources, produced using recombinant expression systems and optionally purified, chemically synthesized, etc. Where appropriate, e.g., in the case of chemically synthesized molecules, nucleic acids can comprise nucleoside analogs such as analogs having chemically modified bases or sugars, and backbone modifications. A nucleic acid sequence is presented in the 5′ to 3′ direction unless otherwise indicated. In some embodiments, a nucleic acid is or comprises natural nucleosides (e.g. adenosine, thymidine, guanosine, cytidine, uridine, deoxyadenosine, deoxythymidine, deoxyguanosine, and deoxycytidine); nucleoside analogs (e.g., 2-aminoadenosine, 2-thiothymidine, inosine, pyrrolo-pyrimidine, 3-methyl adenosine, 5-methylcytidine, 2-aminoadenosine, C5-bromouridine, C5-fluorouridine, C5-iodouridine, C5-propynyl-uridine, C5-propynyl-cytidine, C5-methylcytidine, 2-aminoadenosine, 7-deazaadenosine, 7-deazaguanosine, 8-oxoadenosine, 8-oxoguanosine, 0(6)-methylguanine, and 2-thiocytidine); chemically modified bases; biologically modified bases (e.g., methylated bases); intercalated bases; modified sugars (e.g., 2′-fluororibose, ribose, 2′-deoxyribose, arabinose, and hexose); and/or modified phosphate groups (e.g., phosphorothioates and 5′-N-phosphoramidite linkages). In some embodiments, an RNA is an RNA associated with the Cas9 system. For example, the RNA may be a CRISPR RNA (crRNA), a trans-encoded small RNA (tracrRNA), a single guide RNA (sgRNA), or a guide RNA (gRNA).

[0111] The term “proliferative disease,” as used herein, refers to any disease in which cell or tissue homeostasis is disturbed in that a cell or cell population exhibits an abnormally elevated proliferation rate. Proliferative diseases include hyperproliferative diseases, such as pre-neoplastic hyperplastic conditions and neoplastic diseases. Neoplastic diseases are characterized by an abnormal proliferation of cells and include both benign and malignant neoplasias. Malignant neoplasia is also referred to as cancer.

[0112] The terms “protein,” “peptide,” and “polypeptide” are used interchangeably herein, and refer to a polymer of amino acid residues linked together by peptide (amide) bonds. The terms refer to a protein, peptide, or polypeptide of any size, structure, or function. Typically, a protein, peptide, or polypeptide will be at least three amino acids long. A protein, peptide, or polypeptide may refer to an individual protein or a collection of proteins. One or more of the amino acids in a protein, peptide, or polypeptide may be modified, for example, by the addition of a chemical entity such as a carbohydrate group, a hydroxyl group, a phosphate group, a farnesyl group, an isofarnesyl group, a fatty acid group, a linker for conjugation, functionalization, or other modification, etc. A protein, peptide, or polypeptide may also be a single molecule or may be a multi-molecular complex. A protein, peptide, or polypeptide may be just a fragment of a naturally occurring protein or peptide. A protein, peptide, or polypeptide may be naturally occurring, recombinant, or synthetic, or any combination thereof. The term “fusion protein” as used herein refers to a hybrid polypeptide which comprises protein domains from at least two different proteins. One protein may be located at the amino-terminal (N-terminal) portion of the fusion protein or at the carboxy-terminal (C-terminal) protein thus forming an “amino-terminal fusion protein” or a “carboxy-terminal fusion protein,” respectively. A protein may comprise different domains, for example, a nucleic acid binding domain (e.g., the gRNA binding domain of Cas9 that directs the binding of the protein to a target site) and a nucleic acid cleavage domain or a catalytic domain of a nucleic-acid editing protein. In some embodiments, a protein comprises a proteinaceous part, e.g., an amino acid sequence constituting a nucleic acid binding domain, and an organic compound, e.g., a compound that can act as a nucleic acid cleavage agent. In some embodiments, a protein is in a complex with, or is in association with, a nucleic acid, e.g., RNA. Any of the proteins provided herein may be produced by any method known in the art. For example, the proteins provided herein may be produced via recombinant protein expression and purification, which is especially suited for fusion proteins comprising a peptide linker. Methods for recombinant protein expression and purification are well known, and include those described by Green and Sambrook, Molecular Cloning: A Laboratory Manual (4^{th} ed., Cold Spring Harbor Laboratory Press, Cold Spring Harbor, N.Y. (2012)), the entire contents of which are incorporated herein by reference.

[0113] The term “RNA-programmable nuclease,” and “RNA-guided nuclease” are used interchangeably herein and refer to a nuclease that forms a complex with (e.g., binds or associates with) one or more RNA that is not a target for cleavage. In some embodiments, an RNA-programmable nuclease, when in a complex with an RNA, may be referred to as a nuclease:RNA complex. Typically, the bound RNA(s) is referred to as a guide RNA (gRNA). gRNAs can exist as a complex of two or more RNAs, or as a single RNA molecule. gRNAs that exist as a single RNA molecule may be referred to as single-guide RNAs (sgRNAs), though “gRNA” is used interchangeably to refer to guide RNAs that exist as either single molecules or as a complex of two or more molecules. Typically, gRNAs that exist as single RNA species comprise two domains: (1) a domain that shares homology to a target nucleic acid (e.g., and directs binding of a Cas9 complex to the target); and (2) a domain that binds a Cas9 protein. In some embodiments, domain (2) corresponds to a sequence known as a tracrRNA, and comprises a stem-loop structure. For example, in some embodiments, domain (2) is identical or homologous to a tracrRNA as provided in Jinek et al., Science 337:816-821(2012), the entire contents of which is incorporated herein by reference. Other examples of gRNAs (e.g., those including domain 2) can be found in U.S. Provisional Patent Application, U.S. Ser. No. 61/874,682, filed Sep. 6, 2013, entitled “Switchable Cas9 Nucleases and Uses Thereof,” and U.S. Provisional Patent Application, U.S. Ser. No. 61/874,746, filed Sep. 6, 2013, entitled “Delivery System For Functional Nucleases,” the entire contents of each are hereby incorporated by reference in their entirety. In some embodiments, a gRNA comprises two or more of domains (1) and (2), and may be referred to as an “extended gRNA.” For example, an extended gRNA will, e.g., bind two or more Cas9 proteins and bind a target nucleic acid at two or more distinct regions, as described herein. The gRNA comprises a nucleotide sequence that complements a target site, which mediates binding of the nuclease/RNA complex to said target site, providing the sequence specificity of the nuclease:RNA complex. In some embodiments, the RNA-programmable nuclease is the (CRISPR-associated system) Cas9 endonuclease, for example Cas9 (Csn1) from Streptococcus pyogenes (see, e.g., “Complete genome sequence of an M1 strain of Streptococcus pyogenes.” Ferretti J. J., McShan W. M., Ajdic D. J., Savic D. J., Savic G., Lyon K., Primeaux C., Sezate S., Suvorov A. N., Kenton S., Lai H. S., Lin S. P., Qian Y., Jia H. G., Najar F. Z., Ren Q., Zhu H., Song L., White J., Yuan X., Clifton S. W., Roe B. A., McLaughlin R. E., Proc. Natl. Acad. Sci. U.S.A. 98:4658-4663 (2001); “CRISPR RNA maturation by trans-encoded small RNA and host factor RNase III.” Deltcheva E., Chylinski K., Sharma C. M., Gonzales K., Chao Y., Pirzada Z. A., Eckert M. R., Vogel J., Charpentier E., Nature 471:602-607 (2011); and “A programmable dual-RNA-guided DNA endonuclease in adaptive bacterial immunity.” Jinek M., Chylinski K., Fonfara I., Hauer M., Doudna J. A., Charpentier E. Science 337:816-821 (2012), the entire contents of each of which are incorporated herein by reference.

[0114] Because RNA-programmable nucleases (e.g., Cas9) use RNA:DNA hybridization to target DNA cleavage sites, these proteins are able to be targeted, in principle, to any sequence specified by the guide RNA. Methods of using RNA-programmable nucleases, such as Cas9, for site-specific cleavage (e.g., to modify a genome) are known in the art (see e.g., Cong, L. et al. Multiplex genome engineering using CRISPR/Cas systems. Science 339, 819-823 (2013); Mali, P. et al. RNA-guided human genome engineering via Cas9. Science 339, 823-826 (2013); Hwang, W. Y. et al. Efficient genome editing in zebrafish using a CRISPR-Cas system. Nature biotechnology 31, 227-229 (2013); Jinek, M. et al. RNA-programmed genome editing in human cells. eLife 2, e00471 (2013); Dicarlo, J. E. et al. Genome engineering in Saccharomyces cerevisiae using CRISPR-Cas systems. Nucleic acids research (2013); Jiang, W. et al. RNA-guided editing of bacterial genomes using CRISPR-Cas systems. Nature biotechnology 31, 233-239 (2013); the entire contents of each of which are incorporated herein by reference).

[0115] The term “subject,” as used herein, refers to an individual organism, for example, an individual mammal. In some embodiments, the subject is a human. In some embodiments, the subject is a non-human mammal. In some embodiments, the subject is a non-human primate. In some embodiments, the subject is a rodent. In some embodiments, the subject is a sheep, a goat, a cattle, a cat, or a dog. In some embodiments, the subject is a vertebrate, an amphibian, a reptile, a fish, an insect, a fly, or a nematode. In some embodiments, the subject is a research animal. In some embodiments, the subject is genetically engineered, e.g., a genetically engineered non-human subject. The subject may be of either sex, of any age, and at any stage of development.

[0116] The term “target site” refers to a sequence within a nucleic acid molecule that is deaminated by a deaminase or a fusion protein comprising a deaminase (e.g., a dCas9-deaminase fusion protein provided herein).

[0117] The terms “treatment,” “treat,” and “treating,” refer to a clinical intervention aimed to reverse, alleviate, delay the onset of, or inhibit the progress of a disease or disorder, or one or more symptoms thereof, as described herein. As used herein, the terms “treatment,” “treat,” and “treating” refer to a clinical intervention aimed to reverse, alleviate, delay the onset of, or inhibit the progress of a disease or disorder, or one or more symptoms thereof, as described herein. In some embodiments, treatment may be administered after one or more symptoms have developed and/or after a disease has been diagnosed. In other embodiments, treatment may be administered in the absence of symptoms, e.g., to prevent or delay onset of a symptom or inhibit onset or progression of a disease. For example, treatment may be administered to a susceptible individual prior to the onset of symptoms (e.g., in light of a history of symptoms and/or in light of genetic or other susceptibility factors). Treatment may also be continued after symptoms have resolved, for example, to prevent or delay their recurrence.

[0118] The term “recombinant” as used herein in the context of proteins or nucleic acids refers to proteins or nucleic acids that do not occur in nature, but are the product of human engineering. For example, in some embodiments, a recombinant protein or nucleic acid molecule comprises an amino acid or nucleotide sequence that comprises at least one, at least two, at least three, at least four, at least five, at least six, or at least seven mutations as compared to any naturally occurring sequence.

[0119] The term “nucleic acid editing enzyme” as used herein refers to proteins that are able to modify a nucleic acids or one or more nucleotide bases of a nucleic acid. For example, in some embodiments, a nucleic acid editing enzyme is a deaminase, which can catalyze C to T or G to A changes. Other suitable nucleid acid editing enzyme that may be used in accordance with this disclosure include, without limitation, a nuclease, nickase, recombinase, deaminase, methyltransferase, methylase, acetylase, or acetyltransferase.

### DETAILED DESCRIPTION OF CERTAIN EMBODIMENTS OF THE INVENTION

[0120] Some aspects of this disclosure provide recombinant Cas9 proteins that efficiently target DNA sequences that do not comprise the canonical PAM sequence (5′-NGG-3′, where N is any nucleotide, for example A, T, G, or C) at their 3′-ends. In some embodiments, the Cas9 proteins provided herein comprise one or more mutations identified in directed evolution experiments using a target sequence library comprising randomized PAM sequences. The recombinant non-PAM restricted Cas9 proteins provided herein are useful for targeting DNA sequences that do not comprise the canonical PAM sequence at their 3′-end and thus greatly extend the usefulness of Cas9 technology for gene editing.

[0121] Some aspects of this disclosure provide fusion proteins that comprise a Cas9 protein and an effector domain, for example, a DNA-editing domain, such as, e.g., a deaminase domain. The deamination of a nucleobase by a deaminase can lead to a point mutation at the specific residue, which is referred to herein as nucleic acid editing. Fusion proteins comprising a Cas9 protein or variant thereof and a DNA-editing domain can thus be used for the targeted editing of nucleic acid sequences. Such fusion proteins are useful for targeted editing of DNA in vitro, e.g., for the generation of mutant cells or animals; for the introduction of targeted mutations, e.g., for the correction of genetic defects in cells ex vivo, e.g., in cells obtained from a subject that are subsequently re-introduced into the same or another subject; and for the introduction of targeted mutations, e.g., the correction of genetic defects or the introduction of deactivating mutations in disease-associated genes in a subject in vivo. Typically, the Cas9 protein of the fusion proteins described herein does not have any nuclease activity but instead is a Cas9 fragment or a dCas9 protein. Methods for the use of Cas9 fusion proteins as described herein are also provided.

[0122] Non-limiting, exemplary nuclease-inactive Cas9 proteins are provided herein. One exemplary suitable nuclease-inactive Cas9 protein is the D10A/H840A Cas9 protein mutant:

MDKKYSIGLAIGTNSVGWAVITDEYKVPSKKEKVLGNTDRHSIKKNLIGA
LLFDSGETAEATRLKRTARRRYTRRKNRICYLQEIFSNEMAKVDDSFFHR
LEESFLVEEDKKHERHPIFGNIVDEVAYHEKYPTIYHLRKKLVDSTDKAD
LRLIYLALAHMIKFRGHFLIEGDLNPDNSDVDKLFIQLVQTYNQLFEENP
INASGVDAKAILSARLSKSRRLENLIAQLPGEKKNGLFGNLIALSLGLIP
NFKSNFDLAEDAKLQLSKDTYDDDLDNLLAQIGDQYADLFLAAKNLSDAI
LLSDILRVNTEITKAPLSASMIKRYDEHHQDLTLLKALVRQQLPEKYKEI
FFDQSKNGYAGYIDGGASQEEFYKFIKPILEKMDGTEELLVKLNREDLLR
KQRTFDNGSIPHQIHLGELHAILRRQEDFYPFLKDNREKIEKILTFRIPY
YVGPLARGNSRFAWMTRKSEETITPWNFEEVVDKGASAQSFIERMTNFDK
NLPNEKVLPKHSLLYEYFTVYNELTKVKYVTEGMRKPAFLSGEQKKAIVD
LLFKTNRKVIVKQLKEDYFKKIECFDSVEISGVEDRFNASLGTYHDLLKI
IKDKDFLDNEENEDILEDIVLTLTLFEDREMIEERLKTYAHLFDDKVMKQ
LKRRRYTGWGRLSRKLINGIRDKQSGKTILDFLKSDGFANRNFMQLIHDD
SLTFKEDIQKAQVSGQGDSLHEHIANLAGSPAIKKGILQTVKVVDELVKV
MGRHKPENIVIEMARENQTTQKGQKNSRERMKRIEEGIKELGSQILKEHP
VENTQLQNEKLYLYYLQNGRDMYVDQELDINRLSDYDVDAIVPQSFLKDD
SIDNKVLTRSDKNRGKSDNVPSEEVVKKMKNYWRQLLNAKLITQRKFDNL
TKAERGGLSELDKAGFIKRQLVETRQITKHVAQILDSRMNTKYDENDKLI
REVKVITLKSKLVSDERKDFQFYKVREINNYHHAHDAYLNAVVGTALIKK
YPKLESEFVYGDYKVYDVRKMIAKSEQEIGKATAKYFFYSNIMNFFKTEI
TLANGEIRKRPLIEINGETGEIVWDKGRDFATVRKVLSMPQVNIVKKTEV
QTGGFSKESILPKRNSDKLIARKKDWDPKKYGGFDSPTVAYSVLVVAKVE
KGKSKKLKSVKELLGITIMERSSFEKNPIDFLEAKGYKEVKKDLIIKLPK
YSLFELENGRKRMLASAGELQKGNELALPSKYVNFLYLASHYEKLKGSPE
DNEQKQLFVEQHKHYLDEIIEQISEFSKRVILADANLDKVLSAYNKHRDK
PIREQAENIIHLFTLTNLGAPAAFKYFDTTIDRKRYTSTKEVLDATLIHQ
SITGLYETRIDLSQLGGD (SEQ ID NO: 262;

see, e.g., Qi et al., Repurposing CRISPR as an RNA-guided platform for sequence-specific control of gene expression. Cell. 2013; 152(5):1173-83, the entire contents of which are incorporated herein by reference).

[0123] Additional suitable nuclease-inactive Cas9 proteins will be apparent to those of skill in the art based on this disclosure. Such additional exemplary suitable nuclease-inactive Cas9 proteins include, but are not limited to, D10A, D839A, H840A, N863A, D10A/D839A, D10A/H840A, D10A/N863A, D839A/H840A, D839A/N863A, D10A/D839A/H840A, and D10A/D839A/H840A/N863A mutant proteins (See, e.g., Prashant et al., CAS9 transcriptional activators for target specificity screening and paired nickases for cooperative genome engineering. Nature Biotechnology. 2013; 31(9): 833-838, the entire contents of which are incorporated herein by reference).

### Recombinant Cas9 Proteins

[0124] Some aspects of this disclosure provide recombinant Cas9 proteins comprising an amino acid sequence that is at least 80%, at least 85%, at least 90%, at least 92%, at least 95%, at least 96%, at least 97%, at least 98%, at least 99%, or at least 99.5% identical to the amino acid sequence of Cas9 as provided by any of the sequences provided in SEQ ID NOs: 10-262, wherein the Cas9 protein comprises a RuvC and an HNH domain, wherein the amino acid sequence of the Cas9 protein comprises at least one, at least two, at least three, at least four, at least five, at least six, or at least seven mutations at an amino acid residue selected from the group consisting of amino acid residues 122, 137, 182, 262, 294, 409, 480, 543, 660, 694, 1219, and 1329 of the amino acid sequence provided in SEQ ID NO: 9, or in a corresponding amino acid residue in any of the amino acid sequences provided in SEQ ID NOs: 10-262, and wherein the amino acid sequence of the recombinant Cas9 protein is not identical to the amino acid sequence of a naturally occurring Cas9 protein.

[0125] In some embodiments, the amino acid sequence of the Cas9 protein comprises at least one, at least two, at least three, at least four, at least five, at least six, or at least seven mutations selected from the group consisting of X262T, X294R, X409I, X480K, X543D, X694I, and X1219V of the amino acid sequence provided in SEQ ID NO: 9, or a corresponding mutation in any of the amino acid sequences provided in SEQ ID NOs: 10-262, wherein X represents any amino acid at the corresponding position.

[0126] In some embodiments, the amino acid sequence of the Cas9 protein comprises at least one, at least two, at least three, at least four, at least five, at least six, or at least seven mutations selected from the group consisting of A262T, K294R, S409I, E480K, E543D, M694I, or E1219V of the amino acid sequence provided in SEQ ID NO: 9, or a corresponding mutation in any of the amino acid sequences provided in SEQ ID NOs: 10-262. In some embodiments, the amino acid sequence of the Cas9 protein comprises an X1219V mutation of the amino acid sequence provided in SEQ ID NO: 9, or a corresponding mutation in any of the amino acid sequences provided in SEQ ID NOs: 10-262. In some embodiments, the amino acid sequence of the Cas9 protein comprises an E1219V mutation of the amino acid sequence provided in SEQ ID NO: 9, or a corresponding mutation in any of the amino acid sequences provided in SEQ ID NOs: 10-262.

[0127] In some embodiments, the amino acid sequence of the HNH domain is at least 80%, at least 85%, at least 90%, at least 92%, at least 95%, at least 96%, at least 97%, at least 98%, at least 99%, or at least 99.5% identical to the amino acid sequence of the HNH domain of SEQ ID NO: 9. In some embodiments, the amino acid sequence of the RuvC domain is at least 80%, at least 85%, at least 90%, at least 92%, at least 95%, at least 96%, at least 97%, at least 98%, at least 99%, or at least 99.5% identical to the amino acid sequence of the RuvC domain of any of SEQ ID NOs: 10-262. In some embodiments, the amino acid sequence of the RuvC domain is at least 80%, at least 85%, at least 90%, at least 92%, at least 95%, at least 96%, at least 97%, at least 98%, at least 99%, or at least 99.5% identical to the amino acid sequence of the RuvC domain of SEQ ID NO: 9. In some embodiments, the Cas9 protein comprises a D10A and/or a H840A mutation of the amino acid sequence provided in SEQ ID NO: 9, or a corresponding mutation in any of the amino acid sequences provided in SEQ ID NOs: 10-262.

Recombinant Cas9 Proteins with Activity on Non-Canonical PAMs

[0128] Some aspects of this disclosure provide recombinant Cas9 proteins comprising an amino acid sequence that is at least 90% identical to the amino acid sequence of Streptococcus pyogenes Cas9 as provided by SEQ ID NO: 9, comprising the RuvC and HNH domains of SEQ ID NO: 9, wherein the amino acid sequence of the Cas9 protein comprises at least one, at least two, at least three, at least four, at least five, at least six, or at least seven mutations in an amino acid residue selected from the group consisting of amino acid residues 122, 137, 182, 262, 294, 409, 480, 543, 660, 694, 1219, and 1329 of the amino acid sequence provided in SEQ ID NO: 9, wherein the amino acid sequence of the recombinant Cas9 protein is not identical to the amino acid sequence of a naturally occurring Cas9 protein, and wherein the recombinant Cas9 protein exhibits activity (e.g., increased activity) on a target sequence that does not comprise the canonical PAM (5′-NGG-3′) at its 3′-end as compared to Streptococcus pyogenes Cas9 as provided by SEQ ID NO: 9.

[0129] In some embodiments, the Cas9 protein exhibits activity on a target sequence having a 3′-end that is not directly adjacent to the canonical PAM sequence (5′-NGG-3′) that is at least 2-fold, at least 3-fold, at least 5-fold, at least 10-fold, at least 50-fold, at least 100-fold, at least 500-fold, at least 1,000-fold, at least 5,000-fold, at least 10,000-fold, at least 50,000-fold, at least 100,000-fold, at least 500,000-fold, or at least 1,000,000-fold increased as compared to the activity of Streptococcus pyogenes Cas9 as provided by SEQ ID NO: 9 on the same target sequence. In some embodiments, the 3′-end of the target sequence is directly adjacent to an AGC, GAG, TTT, GTG, or CAA sequence. In some embodiments, the Cas9 protein activity is measured by a nuclease assay, a deamination assay, or a transcriptional activation assay. In some embodiments, the transcriptional activation assay is a reporter activation assay, such as a GFP activation assay. Exemplary methods for measuring binding activity (e.g., of Cas9) using transcriptional activation assays are known in the art and would be apparent to the skilled artisan. For example, methods for measuring Cas9 activity using the tripartite activator VPR have been described in Chavez A., et al., “Highly efficient Cas9-mediated transcriptional programming.” Nature Methods 12, 326-328 (2015); the entire contents of which are incorporated by reference herein.

[0130] In some embodiments, the amino acid sequence of the Cas9 protein comprises at least one, at least two, at least three, at least four, at least five, at least six, or at least seven mutations selected from the group consisting of X262T, X294R, X409I, X480K, X543D, X694I, and X1219V of the amino acid sequence provided in SEQ ID NO: 9, or a corresponding mutation in any of the amino acid sequences provided in SEQ ID NOs: 10-262, wherein X represents any amino acid at the corresponding position.

[0131] In some embodiments, the amino acid sequence of the Cas9 protein comprises at least one, at least two, at least three, at least four, at least five, at least six, or at least seven mutations selected from the group consisting of A262T, K294R, S409I, E480K, E543D, M694I, or E1219V of the amino acid sequence provided in SEQ ID NO: 9, or a corresponding mutation in any of the amino acid sequences provided in SEQ ID NOs: 10-262. In some embodiments, the amino acid sequence of the Cas9 protein comprises an X1219V mutation of the amino acid sequence provided in SEQ ID NO: 9, or a corresponding mutation in any of the amino acid sequences provided in SEQ ID NOs: 10-262. In some embodiments, the amino acid sequence of the Cas9 comprises an X1219V mutation of the amino acid sequence provided in SEQ ID NO: 9, or a corresponding mutation in any of the amino acid sequences provided in SEQ ID NOs: 10-262.

[0132] In some embodiments, the amino acid sequence of the HNH domain is at least 80%, at least 85%, at least 90%, at least 92%, at least 95%, at least 96%, at least 97%, at least 98%, at least 99%, or at least 99.5% identical to the amino acid sequence of the HNH domain of any of SEQ ID NOs: 2, 4, or 9. In some embodiments, the amino acid sequence of the RuvC domain is at least 80%, at least 85%, at least 90%, at least 92%, at least 95%, at least 96%, at least 97%, at least 98%, at least 99%, or at least 99.5% identical to the amino acid sequence of the RuvC domain of any of SEQ ID NOs: 10-262. In some embodiments, the Cas9 protein comprises a D10A and/or a H840A mutation of the amino acid sequence provided in SEQ ID NO: 9, or a corresponding mutation in any of the amino acid sequences provided in SEQ ID NOs: 10-262.

[0133] Some aspects of this disclosure provide recombinant Cas9 proteins comprising an amino acid sequence that is at least 90% identical to the amino acid sequence of Streptococcus pyogenes Cas9 as provided by SEQ ID NO: 9, comprising the RuvC and HNH domains of SEQ ID NO: 9, wherein the amino acid sequence of the Cas9 protein comprises at least one, at least two, at least three, at least four, at least five, at least six, or at least seven mutations in an amino acid residue selected from the group consisting of amino acid residues 122, 137, 182, 262, 294, 409, 480, 543, 660, 694, 1219, and 1329 of the amino acid sequence provided in SEQ ID NO: 9, wherein the amino acid sequence of the recombinant Cas9 protein is not identical to the amino acid sequence of a naturally occurring Cas9 protein, and wherein the recombinant Cas9 protein exhibits an increased activity on a target sequence that does not comprise the canonical PAM (5′-NGG-3′) at its 3′-end as compared to Streptococcus pyogenes Cas9 as provided by SEQ ID NO: 9. In some embodiments, the amino acid sequence of the RuvC domain is at least 80%, at least 85%, at least 90%, at least 92%, at least 95%, at least 96%, at least 97%, at least 98%, at least 99%, or at least 99.5% identical to the amino acid sequence of the RuvC domain of any of SEQ ID NOs: 2, 4, or 9. In some embodiments, the Cas9 protein comprises a D10A and a H840A mutation of the amino acid sequence provided in SEQ ID NO: 9, or a corresponding mutation in any of the amino acid sequences provided in SEQ ID NOs: 10-262.

[0134] Some aspects of this disclosure provide recombinant Cas9 proteins comprising an amino acid sequence that is at least 90% identical to the amino acid sequence of Streptococcus pyogenes Cas9 as provided by SEQ ID NO: 9, comprising the RuvC and HNH domains of SEQ ID NO: 9, wherein the amino acid sequence of the Cas9 protein comprises at least one, at least two, at least three, at least four, at least five, at least six, or at least seven mutations in an amino acid residue selected from the group consisting of amino acid residues 122, 137, 182, 262, 294, 409, 480, 543, 660, 694, 1219, and 1329 of the amino acid sequence provided in SEQ ID NO: 9, wherein the amino acid sequence of the recombinant Cas9 protein is not identical to the amino acid sequence of a naturally occurring Cas9 protein, and wherein the recombinant Cas9 protein exhibits an increased activity on a target sequence that does not comprise the canonical PAM (5′-NGG-3′) at its 3′-end as compared to Streptococcus pyogenes Cas9 as provided by SEQ ID NO: 9. In some embodiments, the amino acid sequence of the RuvC domain is at least 80%, at least 85%, at least 90%, at least 92%, at least 95%, at least 96%, at least 97%, at least 98%, at least 99%, or at least 99.5% identical to the amino acid sequence of the RuvC domain of any of SEQ ID NOs: 2, 4, or 9. In some embodiments, the Cas9 protein comprises a D10A mutation of the amino acid sequence provided in SEQ ID NO: 9, or a corresponding mutation in any of the amino acid sequences provided in SEQ ID NOs: 10-262. In some embodiments, the Cas9 further comprises a histidine residue at position 840 as provided in SEQ ID NO: 9, or a corresponding histidine residue in any of the amino acid sequences provided in SEQ ID NOs: 10-262. Without wishing to be bound by any particular theory, the presence of the catalytic residue H840 allows Cas9 to cleave the non-targeted strand, i.e., the strand bound by the sgRNA. In some embodiments, a Cas9 having an amino acid residue other than histidine at position 840 of the amino acid sequence provided in SEQ ID NO: 9, or a corresponding amino acid sequence provided in SEQ ID NOs: 10-262 may be changed or reverted such that amino acid residue 840 of the amino acid sequence provided in SEQ ID NO: 9, or a corresponding amino acid sequence provided in SEQ ID NOs: 10-262 is histidine.

[0135] Some aspects of this disclosure provide recombinant Cas9 proteins comprising an amino acid sequence that is at least 90% identical to the amino acid sequence of Streptococcus pyogenes Cas9 as provided by SEQ ID NO: 9, comprising the RuvC and HNH domains of SEQ ID NO: 9; wherein the amino acid sequence of the Cas9 protein comprises at least one, at least two, at least three, at least four, at least five, at least six, or at least seven mutations in an amino acid residue selected from the group consisting of amino acid residues 262, 267, 294, 405, 409, 480, 543, 694, 1219, 1224, and 1256 of the amino acid sequence provided in SEQ ID NO: 9; wherein the amino acid sequence of the recombinant Cas9 protein is not identical to the amino acid sequence of a naturally occurring Cas9 protein; and wherein the recombinant Cas9 protein exhibits activity (e.g., increased activity) on a target sequence that does not comprise the canonical PAM (5′-NGG-3′) at its 3′-end as compared to Streptococcus pyogenes Cas9 as provided by SEQ ID NO: 9.

[0136] In some embodiments, the Cas9 protein exhibits an activity on a target sequence having a 3′-end that is not directly adjacent to the canonical PAM sequence (5′-NGG-3′) that is at least 2-fold, at least 3-fold, at least 5-fold, at least 10-fold, at least 50-fold, at least 100-fold, at least 500-fold, at least 1,000-fold, at least 5,000-fold, at least 10,000-fold, at least 50,000-fold, at least 100,000-fold, at least 500,000-fold, or at least 1,000,000-fold increased as compared to the activity of Streptococcus pyogenes Cas9 as provided by SEQ ID NO: 9 on the same target sequence. In some embodiments, the 3′-end of the target sequence is directly adjacent to an AAA, AAC, AAG, AAT, CAA, CAC, CAG, CAT, GAA, GAC, GAG, GAT, TAA, TAC, TAG, TAT, ACA, ACC, ACG, ACT, CCA, CCC, CCG, CCT, GCA, GCC, GCG, GCT, TCA, TCC, TCG, TCT, AGA, AGC, AGT, CGA, CGC, CGT, GGA, GGC, GGT, TGA, TGC, TGT, ATA, ATC, ATG, ATT, CTA, CTC, CTG, CTT, GTA, GTC, GTG, GTT, TTA, TTC, TTG, or TTT PAM sequence.

[0137] In some embodiments, the amino acid sequence of the Cas9 protein comprises at least one, at least two, at least three, at least four, at least five, at least six, or at least seven mutations selected from the group consisting of X262T, X267G, X294R, X405I, X409I, X480K, X543D, X694I, X1219V, X1224K, X1256K, and X1362P of the amino acid sequence provided in SEQ ID NO: 9, or a corresponding mutation in any of the amino acid sequences provided in SEQ ID NOs: 10-262, wherein X represents any amino acid at the corresponding position.

[0138] In some embodiments, the amino acid sequence of the Cas9 protein comprises at least one, at least two, at least three, at least four, at least five, at least six, or at least seven mutations selected from the group consisting of A262T, S267G, K294R, F405I, S409I, E480K, E543D, M694I, E1219V, N1224K, Q1256K, and L1362P of the amino acid sequence provided in SEQ ID NO: 9, or a corresponding mutation in any of the amino acid sequences provided in SEQ ID NOs: 10-262. In some embodiments, the amino acid sequence of the Cas9 protein comprises an X1219V mutation of the amino acid sequence provided in SEQ ID NO: 9, or a corresponding mutation in any of the amino acid sequences provided in SEQ ID NOs: 10-262. In some embodiments, the amino acid sequence of the Cas9 protein comprises an E1219V mutation of the amino acid sequence provided in SEQ ID NO: 9, or a corresponding mutation in any of the amino acid sequences provided in SEQ ID NOs: 10-262.

[0139] In some embodiments, the amino acid sequence of the Cas9 protein comprises an X480K mutation of the amino acid sequence provided in SEQ ID NO: 9, or a corresponding mutation in any of the amino acid sequences provided in SEQ ID NOs: 10-262. In some embodiments, the amino acid sequence of the Cas9 protein comprises an E480K mutation of the amino acid sequence provided in SEQ ID NO: 9, or a corresponding mutation in any of the amino acid sequences provided in SEQ ID NOs: 10-262.

[0140] In some embodiments, the amino acid sequence of the Cas9 protein comprises an X543D mutation of the amino acid sequence provided in SEQ ID NO: 9, or a corresponding mutation in any of the amino acid sequences provided in SEQ ID NOs: 10-262. In some embodiments, the amino acid sequence of the Cas9 protein comprises an E543D mutation of the amino acid sequence provided in SEQ ID NO: 9, or a corresponding mutation in any of the amino acid sequences provided in SEQ ID NOs: 10-262.

[0141] In some embodiments, the amino acid sequence of the Cas9 protein comprises the combination of mutations selected from the group consisting of (X480K, X543D, and X1219V); (X262T, X409I, X480K, X543D, X694I, and X1219V); (X294R, X480K, X543D, X1219V, X1256K, and X1362P); (X294R, X480K, X543D, X1219V, and X1256K); (X267G, X294R, X480K, X543D, X1219V, X1224K, and X1256K); and (X262T, X405I, X409I, X480K, X543D, X694I, and X1219V) of the amino acid sequence provided in SEQ ID NO: 9, or a corresponding mutation in any of the amino acid sequences provided in SEQ ID NOs: 10-262. In some embodiments, the amino acid sequence of the Cas9 protein comprises the combination of mutations selected from the group consisting of (E480K, E543D, and E1219V); (A262T, S409I, E480K, E543D, M694I, and E1219V); (K294R, E480K, E543D, E1219V, Q1256K, and L1362P); (K294R, E480K, E543D, E1219V, and Q1256K); (S267G, K294R, E480K, E543DE1219V, N1224K, and Q1256K); and (A262T, F405I, S409I, E480K, E543D, M694I, and E1219V) of the amino acid sequence provided in SEQ ID NO: 9, or a corresponding mutation in any of the amino acid sequences provided in SEQ ID NOs: 10-262.

[0142] In some embodiments, the amino acid sequence of the HNH domain is at least 80%, at least 85%, at least 90%, at least 92%, at least 95%, at least 96%, at least 97%, at least 98%, at least 99%, or at least 99.5% identical to the amino acid sequence of the HNH domain of any of SEQ ID NOs: 2, 4, or 9. In some embodiments, the amino acid sequence of the RuvC domain is at least 80%, at least 85%, at least 90%, at least 92%, at least 95%, at least 96%, at least 97%, at least 98%, at least 99%, or at least 99.5% identical to the amino acid sequence of the RuvC domain of any of SEQ ID NOs: 2, 4, or 9. In some embodiments, the Cas9 protein comprises a D10A and/or a H840A mutation of the amino acid sequence provided in SEQ ID NO: 9, or a corresponding mutation in any of the amino acid sequences provided in SEQ ID NOs: 10-262. In some embodiments, the Cas9 protein comprises a D10A and an H840A mutation of the amino acid sequence provided in SEQ ID NO: 9, or a corresponding mutation in any of the amino acid sequences provided in SEQ ID NOs: 10-262. In some embodiments, the Cas9 protein comprises a D10A mutation of the amino acid sequence provided in SEQ ID NO: 9, or a corresponding mutation in any of the amino acid sequences provided in SEQ ID NOs: 10-262. In some embodiments, the Cas9 protein comprises an H840A mutation of the amino acid sequence provided in SEQ ID NO: 9, or a corresponding mutation in any of the amino acid sequences provided in SEQ ID NOs: 10-262.

[0143] Some aspects of this disclosure provide recombinant Cas9 proteins comprising an amino acid sequence that is at least 90% identical to the amino acid sequence of Streptococcus pyogenes Cas9 as provided by SEQ ID NO: 9, comprising the RuvC and HNH domains of SEQ ID NO: 9, wherein the amino acid sequence of the Cas9 protein comprises at least one, at least two, at least three, at least four, at least five, at least six, or at least seven mutations in an amino acid residue selected from the group consisting of amino acid residues 262, 267, 294, 405, 409, 480, 543, 694, 1219, 1224, 1256, and 1362 of the amino acid sequence provided in SEQ ID NO: 9, wherein the amino acid sequence of the recombinant Cas9 protein is not identical to the amino acid sequence of a naturally occurring Cas9 protein, and wherein the recombinant Cas9 protein exhibits increased activity on a target sequence that does not include the canonical PAM (5′-NGG-3′) at its 3′-end as compared to Streptococcus pyogenes Cas9 as provided by SEQ ID NO: 9. In some embodiments, the amino acid sequence of the RuvC domain is at least 80%, at least 85%, at least 90%, at least 92%, at least 95%, at least 96%, at least 97%, at least 98%, at least 99%, or at least 99.5% identical to the amino acid sequence of the RuvC domain of any of SEQ ID NOs: 2, 4, or 9. In some embodiments, the Cas9 protein comprises a D10A and a H840A mutation of the amino acid sequence provided in SEQ ID NO: 9, or a corresponding mutation in any of the amino acid sequences provided in SEQ ID NOs: 10-262.

[0144] Some aspects of this disclosure provide recombinant Cas9 proteins comprising an amino acid sequence that is at least 90% identical to the amino acid sequence of Streptococcus pyogenes Cas9 as provided by SEQ ID NO: 9, comprising the RuvC and HNH domains of SEQ ID NO: 9, wherein the amino acid sequence of the Cas9 protein comprises at least one, at least two, at least three, at least four, at least five, at least six, or at least seven mutations at an amino acid residue selected from the group consisting of amino acid residues 262, 267, 294, 405, 409, 480, 543, 694, 1219, 1224, 1256, and 1362 of the amino acid sequence provided in SEQ ID NO: 9, wherein the amino acid sequence of the recombinant Cas9 protein is not identical to the amino acid sequence of a naturally occurring Cas9 protein, and wherein the recombinant Cas9 protein exhibits increased activity on a target sequence that does not comprise the canonical PAM (5′-NGG-3′) at its 3′-end as compared to Streptococcus pyogenes Cas9 as provided by SEQ ID NO: 9. In some embodiments, the amino acid sequence of the RuvC domain is at least 80%, at least 85%, at least 90%, at least 92%, at least 95%, at least 96%, at least 97%, at least 98%, at least 99%, or at least 99.5% identical to the amino acid sequence of the RuvC domain of any of SEQ ID NOs: 2, 4, or 9. In some embodiments, the Cas9 protein comprises a D10A mutation of the amino acid sequence provided in SEQ ID NO: 9, or a corresponding mutation in any of the amino acid sequences provided in SEQ ID NOs: 10-262. In some embodiments, the Cas9 further comprises a histidine residue at position 840 as provided in SEQ ID NO: 9, or a corresponding histidine residue in any of the amino acid sequences provided in SEQ ID NOs: 10-262. Without wishing to be bound by any particular theory, the presence of the catalytic residue H840 allows Cas9 to cleave the non-targeted strand, i.e., the strand bound by the sgRNA. In some embodiments, a Cas9 having an amino acid residue other than histidine at position 840 of the amino acid sequence provided in SEQ ID NO: 9, or a corresponding amino acid sequence provided in SEQ ID NOs: 10-262 may be changed or reverted such that amino acid residue 840 of the amino acid sequence provided in SEQ ID NO: 9, or a corresponding amino acid sequence provided in SEQ ID NOs: 10-262 is histidine.

### Cas9 Fusion Proteins

[0145] Some aspects of this disclosure provide fusion proteins comprising a Cas9 protein as provided herein that is fused to a second protein, or a “fusion partner”, such as an effector domain, thus forming a fusion protein. In some embodiments, the effector domain is fused to the N-terminus of the Cas9 protein. In some embodiments, the effector domain is fused to the C-terminus of the Cas9 protein. In some embodiments, the Cas9 protein and the effector domain are fused to each other via a linker. Suitable strategies for generating fusion proteins according to aspects of this disclosure using linkers or without the use of linkers will also be apparent to those of skill in the art in view of the instant disclosure and the knowledge in the art. For example, Gilbert et al., CRISPR-mediated modular RNA-guided regulation of transcription in eukaryotes. Cell. 2013; 154(2):442-51, showed that C-terminal fusions of Cas9 with VP64 using 2 NLS's as a linker (SPKKKRKVEAS, SEQ ID NO: 284), can be employed for transcriptional activation. Mali et al., CAS9 transcriptional activators for target specificity screening and paired nickases for cooperative genome engineering. Nat Biotechnol. 2013; 31(9):833-8, reported that C-terminal fusions with VP64 without linker can be employed for transcriptional activation. And Maeder et al., CRISPR RNA-guided activation of endogenous human genes. Nat Methods. 2013; 10: 977-979, reported that C-terminal fusions with VP64 using a Gly₄Ser (SEQ ID NO: 5) linker can be used as transcriptional activators. Recently, dCas9-FokI nuclease fusions have successfully been generated and exhibit improved enzymatic specificity as compared to the parental Cas9 enzyme (In Guilinger J P, Thompson D B, Liu D R. Fusion of catalytically inactive Cas9 to FokI nuclease improves the specificity of genome modification. Nat. Biotechnol. 2014; 32(6): 577-82, and in Tsai S Q, Wyvekens N, Khayter C, Foden J A, Thapar V, Reyon D, Goodwin M J, Aryee M J, Joung J K. Dimeric CRISPR RNA-guided FokI nucleases for highly specific genome editing. Nat Biotechnol. 2014; 32(6):569-76. PMID: 24770325 a SGSETPGTSESATPES (SEQ ID NO: 7) or a GGGGSₙ (SEQ ID NO: 5) linker was used in FokI-dCas9 fusion proteins, respectively). In some embodiments, the linker comprises a (GGGGS)ₙ (SEQ ID NO: 5), a (G)ₙ, an (EAAAK)ₙ (SEQ ID NO: 6), a (GGS)ₙ, an SGSETPGTSESATPES (SEQ ID NO: 7), or an (XP)ₙ motif, or a combination of any of these, wherein n is independently an integer between 1 and 30. In some embodiments, the effector domain comprises an enzymatic domain. Suiable effector domains include, without limitation a nuclease, nickase, recombinase, deaminase, methyltransferase, methylase, acetylase, acetyltransferase, transcriptional activator, and transcriptional repressor.

[0146] The linker may be as simple as a covalent bond, or it may be a polymeric linker many atoms in length. In certain embodiments, the linker is a polpeptide or based on amino acids. In other embodiments, the linker is not peptide-like. In certain embodiments, the linker is a covalent bond (e.g., a carbon-carbon bond, disulfide bond, carbon-heteroatom bond, etc.). In certain embodiments, the linker is a carbon-nitrogen bond of an amide linkage. In certain embodiments, the linker is a cyclic or acyclic, substituted or unsubstituted, branched or unbranched aliphatic or heteroaliphatic linker. In certain embodiments, the linker is polymeric (e.g., polyethylene, polyethylene glycol, polyamide, polyester, etc.). In certain embodiments, the linker comprises a monomer, dimer, or polymer of aminoalkanoic acid. In certain embodiments, the linker comprises an aminoalkanoic acid (e.g., glycine, ethanoic acid, alanine, beta-alanine, 3-aminopropanoic acid, 4-aminobutanoic acid, 5-pentanoic acid, etc.). In certain embodiments, the linker comprises a monomer, dimer, or polymer of aminohexanoic acid (Ahx). In certain embodiments, the linker is based on a carbocyclic moiety (e.g., cyclopentane, cyclohexane). In other embodiments, the linker comprises a polyethylene glycol moiety (PEG). In other embodiments, the linker comprises amino acids. In certain embodiments, the linker comprises a peptide. In certain embodiments, the linker comprises an aryl or heteroaryl moiety. In certain embodiments, the linker is based on a phenyl ring. The linker may included funtionalized moieties to facilitate attachment of a nucleophile (e.g., thiol, amino) from the peptide to the linker. Any electrophile may be used as part of the linker. Exemplary electrophiles include, but are not limited to, activated esters, activated amides, Michael acceptors, alkyl halides, aryl halides, acyl halides, and isothiocyanates.

[0147] In some embodiments, the effector domain comprises a effector enzyme. Suitable effector enzymes that may be used in accordance with this disclosure include nucleases, nickases, recombinases, and deaminases. However additional effector enzymes would be apparent to the skilled artisan and are within the scope of this disclosure. In other embodiments, the effector domain comprises a domain that modulates transcriptional activity. Such transcriptional modulating domains may be, without limitation, a transcriptional activator or transcriptional repressor domain.

[0148] In some embodiments, the effector domain is a effector domain. In some embodiments, the effector domain is a deaminase domain. In some embodiments, the deaminase is a cytosine deaminase or a cytidine deaminase. In some embodiments, the deaminase is an apolipoprotein B mRNA-editing complex (APOBEC) family deaminase. In some embodiments, the deaminase is an APOBEC1 deaminase. In some embodiments, the deaminase is an APOBEC2 deaminase. In some embodiments, the deaminase is an APOBEC3 deaminase. In some embodiments, the deaminase is an APOBEC3A deaminase. In some embodiments, the deaminase is an APOBEC3D deaminase. In some embodiments, the deaminase is an APOBEC3E deaminase. In some embodiments, the deaminase is an APOBEC3F deaminase. In some embodiments, the deaminase is an APOBEC3G deaminase. In some embodiments, the deaminase is an APOBEC3H deaminase. In some embodiments, the deaminase is an APOBEC4 deaminase. In some embodiments, the deaminase is an activation-induced deaminase (AID).

[0149] In some embodiments, the effector domain is at least 80%, at least 85%, at least 90%, at least 92%, at least 95%, at least 96%, at least 97%, at least 98%, at least 99%, or at least 99.5% identical to the deaminase domain of any one of SEQ ID NOs: 263-281.

[0150] In some embodiments, the effector domain is a nuclease domain. In some embodiments, the nuclease domain is a FokI DNA cleavage domain. In some embodiments, this disclosure provides dimers of the fusion proteins provided herein, e.g., dimers of fusion proteins may include a dimerizing nuclease domain.

[0151] In some embodiments, the Cas9 protein comprises an amino acid sequence that is at least 80%, at least 85%, at least 90%, at least 92%, at least 95%, at least 96%, at least 97%, at least 98%, at least 99%, or at least 99.5% identical to the amino acid sequence of Cas9 as provided by any of the sequences provided in SEQ ID NOs: 10-262, wherein the Cas9 protein comprises a RuvC and an HNH domain, wherein the amino acid sequence of the Cas9 protein comprises at least one, at least two, at least three, at least four, at least five, at least six, or at least seven mutations in an amino acid residue selected from the group consisting of amino acid residues 122, 137, 182, 262, 294, 409, 480, 543, 660, 694, 1219, and 1329 of the amino acid sequence provided in SEQ ID NO: 9, or in a corresponding amino acid residue in any of the amino acid sequences provided in SEQ ID NOs: 10-262, and wherein the amino acid sequence of the recombinant Cas9 protein is not identical to the amino acid sequence of a naturally occurring Cas9 protein. In some embodiments, the Cas9 protein comprises an amino acid sequence that is at least 90% identical to the amino acid sequence of Streptococcus pyogenes Cas9 as provided by SEQ ID NO: 9, comprising the RuvC and HNH domains of SEQ ID NO: 9, wherein the amino acid sequence of the Cas9 protein comprises at least one, at least two, at least three, at least four, at least five, at least six, or at least seven mutations in an amino acid residue selected from the group consisting of amino acid residues 122, 137, 182, 262, 294, 409, 480, 543, 660, 694, 1219, and 1329 of the amino acid sequence provided in SEQ ID NO: 9, wherein the amino acid sequence of the recombinant Cas9 protein is not identical to the amino acid sequence of a naturally occurring Cas9 protein, and wherein the recombinant Cas9 protein exhibits activity on a target sequence that does not comprise the canonical PAM (5′-NGG-3′) at its 3′-end as compared to Streptococcus pyogenes Cas9 as provided by SEQ ID NO: 9.

[0152] In some embodiments, the Cas9 protein comprises an amino acid sequence that is at least 80%, at least 85%, at least 90%, at least 92%, at least 95%, at least 96%, at least 97%, at least 98%, at least 99%, or at least 99.5% identical to the amino acid sequence of Cas9 as provided by any of the sequences provided in SEQ ID NOs: 10-262, wherein the Cas9 protein comprises a RuvC and an HNH domain, wherein the amino acid sequence of the Cas9 protein comprises at least one, at least two, at least three, at least four, at least five, at least six, or at least seven mutations in an amino acid residue selected from the group consisting of amino acid residues 262, 267, 294, 405, 409, 480, 543, 694, 1219, 1224, 1256, and 1362 of the amino acid sequence provided in SEQ ID NO: 9, or in a corresponding amino acid residue in any of the amino acid sequences provided in SEQ ID NOs: 10-262, and wherein the amino acid sequence of the recombinant Cas9 protein is not identical to the amino acid sequence of a naturally occurring Cas9 protein. In some embodiments, the Cas9 protein comprises an amino acid sequence that is at least 90% identical to the amino acid sequence of Streptococcus pyogenes Cas9 as provided by SEQ ID NO: 9, comprising the RuvC and HNH domains of SEQ ID NO: 9, wherein the amino acid sequence of the Cas9 protein comprises at least one, at least two, at least three, at least four, at least five, at least six, or at least seven mutations in an amino acid residue selected from the group consisting of amino acid residues 262, 267, 294, 405, 409, 480, 543, 694, 1219, 1224, and 1256 of the amino acid sequence provided in SEQ ID NO: 9; wherein the amino acid sequence of the recombinant Cas9 protein is not identical to the amino acid sequence of a naturally occurring Cas9 protein; and wherein the recombinant Cas9 protein exhibits increased activity on a target sequence that does not include the canonical PAM (5′-NGG-3′) at its 3′-end, as compared to Streptococcus pyogenes Cas9 as provided by SEQ ID NO: 9.

[0153] Some aspects of this disclosure provide fusion proteins comprising (i) a nuclease-inactive Cas9 protein; and (ii) a effector domain. In some embodiments, the effector domain is a DNA-editing domain. In some embodiments, the effector domain possesses deaminase activity. In some embodiments, the effector domain comprises or is a deaminase domain. In some embodiments, the deaminase is a cytidine deaminase. In some embodiments, the deaminase is an apolipoprotein B mRNA-editing complex (APOBEC) family deaminase. In some embodiments, the deaminase is an APOBEC1 family deaminase. In some embodiments, the deaminase is an activation-induced cytidine deaminase (AID). Some nucleic-acid editing domains as well as Cas9 fusion proteins including such domains are described in detail herein. Additional suitable effector domains will be apparent to the skilled artisan based on this disclosure. In some embodiments, the nucleid-acid editing domain is a FokI nuclease domain.

[0154] The instant disclosure provides Cas9:effector domain fusion proteins of various configurations. In some embodiments, the effector domain is fused to the N-terminus of the Cas9 protein. In some embodiments, the effector domain is fused to the C-terminus of the Cas9 protein. In some embodiments, the Cas9 protein and the effector domain are fused via a linker. In some embodiments, the linker comprises (GGGGS)ₙ (SEQ ID NO: 5), (G)ₙ, (EAAAK)ₙ (SEQ ID NO: 6), (GGS)ₙ, or SGSETPGTSESATPES (SEQ ID NO: 7) motif (see, e.g., Guilinger J P, Thompson D B, Liu D R. Fusion of catalytically inactive Cas9 to FokI nuclease improves the specificity of genome modification. Nat. Biotechnol. 2014; 32(6): 577-82; the entire contents are incorporated herein by reference), or an (XP)ₙ motif, or a combination of any of these, wherein n is independently an integer between 1 and 30. In some embodiments, n is independently 1, 2, 3, 4, 5, 6, 7, 8, 9, 10, 11, 12, 13, 14, 15, 16, 17, 18, 19, 20, 21, 22, 23, 24, 25, 26, 27, 28, 29, or 30, or, if more than one linker or more than one linker motif is present, any combination thereof. Additional suitable linker motifs and linker configurations will be apparent to those of skill in the art. In some embodiments, suitable linker motifs and configurations include those described in Chen et al., Fusion protein linkers: property, design and functionality. Adv Drug Deliv Rev. 2013; 65(10):1357-69, the entire contents of which are incorporated herein by reference. Additional suitable linker sequences will be apparent to those of skill in the art based on the instant disclosure and knowledge in the art.

[0155] In some embodiments, the general architecture of exemplary Cas9 fusion proteins provided herein comprises the structure:

[0156] [NH₂]-[effector domain]-[Cas9]-[COOH] or

[0157] [NH₂]-[Cas9]-[effector domain]-[COOH],

wherein NH₂ is the N-terminus of the fusion protein, and COOH is the C-terminus of the fusion protein. FIG. 11 provides a schematic representation of a Cas9 protein fused to an effector domain (e.g., rAPOBEC 1) in complex with sgRNA and bound to the target nucleic acid sequence.

[0158] In some embodiments, any of the fusion proteins provided herein may comprise one or more nuclear localization sequence (NLS). As used herein, a nuclear localization sequence refers to an amino acid sequence that promotes importation of a protein, for example any of the fusion proteins provided herein having an NLS, into the cell nucleus (e.g., via nuclear transport). Typically, an NLS comprises one or more short amino acid sequences of positively charged lysines or arginines exposed on the protein surface. Nuclear localization sequences are known in the art and would be apparent to the skilled artisan. For example nuclear localization sequences have been described in Kalderon D., et al., “A short amino acid sequence able to specify nuclear location”. Cell (1984) 39 (3 Pt 2): 499-509; Dingwall C., et al., “The nucleoplasmin nuclear location sequence is larger and more complex than that of SV-40 large T antigen”. J Cell Biol. (1988) 107 (3): 841-9; Makkerh J. P., et al., “Comparative mutagenesis of nuclear localization signals reveals the importance of neutral and acidic amino acids”. Curr Biol. (1996) 6 (8): 1025-7; and Ray M., et al., “Quantitative tracking of protein trafficking to the nucleus using cytosolic protein delivery by nanoparticle-stabilized nanocapsules”. Bioconjug. Chem. (2015) 26 (6): 1004-7; the entire contents of each are incorporated by reference herein. Additional nuclear localization sequences are described, for example, in Plank et al., PCT/EP2000/011690, the entire contents are incorporated by reference herein. In some embodiments, a NLS comprises the amino acid sequence PKKKRKV (SEQ ID NO: 299) or MDSLLMNRRKFLYQFKNVRWAKGRRETYLC (SEQ ID NO: 300).

[0159] Exemplary features that may be present are localization sequences, such as nuclear localization sequences, cytoplasmic localization sequences, export sequences, such as nuclear export sequences, or other localization sequences, as well as sequence tags that are useful for solubilization, purification, or detection of the fusion proteins. Suitable localization signal sequences and sequences of protein tags are provided herein, and include, but are not limited to, biotin carboxylase carrier protein (BCCP) tags, myc-tags, calmodulin-tags, FLAG-tags, hemagglutinin (HA)-tags, polyhistidine tags, also referred to as histidine tags or His-tags, maltose binding protein (MBP)-tags, nus-tags, glutathione-S-transferase (GST)-tags, green fluorescent protein (GFP)-tags, thioredoxin-tags, S-tags, Softags (e.g., Softag 1, Softag 3), strep-tags, biotin ligase tags, FlAsH tags, V5 tags, and SBP-tags. Additional suitable sequences will be apparent to those of skill in the art and are within the scope of this disclosure.

[0160] Any of the nuclear localization sequences provided herein may be fused to the fusion protein in any suitable localization. For example, to promote translocation of the fusion protein into a cell nucleus without compromising function of the fusion protein. In some embodiments, the NLS is fused N-terminal to the Cas9 protein of the fusion protein. In some embodiments, the NLS is fused C-terminal to the Cas9 protein of the fusion protein. In some embodiments, the NLS is fused N-terminal to the effector domain of the fusion protein. In some embodiments, the NLS is fused C-terminal to the effector domain of the fusion protein.

[0161] In some embodiments, the effector domain is a deaminase. For example, in some embodiments, the general architecture of exemplary Cas9 fusion proteins with a deaminase domain comprises the structure:

[0162] [NH₂]-[NLS]-[Cas9]-[deaminase]-[COOH],

[0163] [NH₂]-[NLS]-[deaminase]-[Cas9]-[COOH],

[0164] [NH₂]-[Cas9]-[NLS]-[deaminase]-[COOH],

[0165] [NH₂]-[deaminase]-[NLS]-[Cas9]-[COOH],

[0166] [NH₂]-[deaminase]-[Cas9]-[NLS]-[COOH], or

[0167] [NH₂]-[Cas9]-[deaminase]-[NLS]-[COOH],

wherein NLS is a nuclear localization signal, NH₂ is the N-terminus of the fusion protein, and COOH is the C-terminus of the fusion protein. In some embodiments, a linker is inserted between the Cas9 protein and the deaminase domain. In some embodiments, any of the “]-[” may be one or more linkers. In some embodiments, the NLS is located C-terminal of the deaminase and/or the Cas9 domain. In some embodiments, the NLS is located between the deaminase and the Cas9 domain. Additional features, such as sequence tags, may also be present.

[0168] One exemplary suitable type of effector domain includes cytosine deaminases, for example, of the APOBEC family. The apolipoprotein B mRNA-editing complex (APOBEC) family of cytosine deaminase enzymes encompasses eleven proteins that serve to initiate mutagenesis in a controlled and beneficial manner.²⁹ One family member, activation-induced cytidine deaminase (AID), is responsible for the maturation of antibodies by converting cytosines in ssDNA to uracils in a transcription-dependent, strand-biased fashion.³⁰ The apolipoprotein B editing complex 3 (APOBEC3) enzyme provides protection to human cells against a certain HIV-1 strain via the deamination of cytosines in reverse-transcribed viral ssDNA.³¹ These proteins all require a Zn²⁺-coordinating motif (His-X-Glu-X₂₃₋₂₆-Pro-Cys-X₂₄-Cys; SEQ ID NO: 283) and bound water molecule for catalytic activity. The Glu residue acts to activate the water molecule to a zinc hydroxide for nucleophilic attack in the deamination reaction. Each family member preferentially deaminates at its own particular “hotspot,” ranging from WRC (W is A or T, R is A or G) for hAID, to TTC for hAPOBEC3F.³² A recent crystal structure of the catalytic domain of APOBEC3G revealed a secondary structure comprised of a five-stranded (3-sheet core flanked by six α-helices, which is believed to be conserved across the entire family.³³ The active center loops have been shown to be responsible for both ssDNA binding and in determining “hotspot” identity.³⁴ Overexpression of these enzymes has been linked to genomic instability and cancer, thus highlighting the importance of sequence-specific targeting.³⁵

[0169] Some aspects of this disclosure provide a systematic series of fusions between Cas9 and deaminase domains, e.g., cytosine deaminase enzymes such as APOBEC enzymes, or adenosine deaminase enzymes such as ADAT enzymes, that has been generated in order to direct the enzymatic activities of these deaminases to a specific site in genomic DNA. The advantages of using Cas9 as the recognition agent are two-fold: (1) the sequence specificity of Cas9 can be easily altered by simply changing the sgRNA sequence; and (2) Cas9 binds to its target sequence by denaturing the dsDNA, resulting in a stretch of DNA that is single-stranded and therefore a viable substrate for the deaminase. It will be understood that other catalytic domains, or catalytic domains from other deaminases, can also be used to generate fusion proteins with Cas9, and that the disclosure is not limited in this regard.

[0170] Some aspects of this disclosure are based on the recognition that cas9:deaminase fusion proteins can efficiently deaminate nucleotides at positions 3-11 according to the numbering scheme in FIG. 11. It should be appreciated that a person of skill in the art will be able to design suitable guide RNAs to target the fusion proteins to a target sequence that comprises a nucleotide to be deaminated. Both PAM-dependent Cas9 proteins or Cas9 proteins that can target PAM-less target sequences as provided herein, can be employed for deamination of a target nucleotide.

[0171] Some exemplary suitable nucleic-acid editing domains, e.g., deaminases and deaminase domains, that can be fused to Cas9 domains according to aspects of this disclosure are provided below. Typically, deaminase require a Zn₂₊-coordinating motif (His-X-Glu-X₂₃₋₂₆-Pro-Cys-X₂₄-Cys; SEQ ID NO: 283) and bound water molecule for catalytic activity. The Glu residue acts to activate the water molecule to a zinc hydroxide for nucleophilic attack in the deamination reaction. It will be understood that, in some embodiments, the active domain of the respective sequence can be used, e.g., the domain without a localizing signal (nuclear localizing signal, without nuclear export signal, cytoplasmic localizing signal).

Human AID:
(SEQ ID NO: 263)
MDSLLMNRRKFLYQFKNVRWAKGRRETYLCYVVKRRDSATSFSLDFGYL
RNKNGCHVELLFLRYISDWDLDPGRCYRVTWFTSWSPCYDCARHVADFL
RGNPNLSLRIFTARLYFCEDRKAEPEGLRRLHRAGVQIAIMTFKDYFYC
WNTFVENHERTFKAWEGLHENSVRLSRQLRRILLPLYEVDDLRDAFRTL
GL
(underline: nuclear localization signal; double
underline: nuclear export signal)
Mouse AID:
(SEQ ID NO: 264)
MDSLLMKQKKFLYHFKNVRWAKGRHETYLCYVVKRRDSATSCSLDFGHL
RNKSGCHVELLFLRYISDWDLDPGRCYRVTWFTSWSPCYDCARHVAEFL
RWNPNLSLRIFTARLYFCEDRKAEPEGLRRLHRAGVQIGIMTFKDYFYC
WNTFVENRERTFKAWEGLHENSVRLTRQLRRILLPLYEVDDLRDAFRML
GF
(underline: nuclear localization signal; double
underline: nuclear export signal)
Dog AID:
(SEQ ID NO: 265)
MDSLLMKQRKFLYHFKNVRWAKGRHETYLCYVVKRRDSATSFSLDFGHL
RNKSGCHVELLFLRYISDWDLDPGRCYRVTWFTSWSPCYDCARHVADFL
RGYPNLSLRIFAARLYFCEDRKAEPEGLRRLHRAGVQIAIMTFKDYFYC
WNTFVENREKTFKAWEGLHENSVRLSRQLRRILLPLYEVDDLRDAFRTL
GL
(underline: nuclear localization signal; double
underline: nuclear export signal)
Bovine AID:
(SEQ ID NO: 266)
MDSLLKKQRQFLYQFKNVRWAKGRHETYLCYVVKRRDSPTSFSLDFGHL
RNKAGCHVELLFLRYISDWDLDPGRCYRVTWFTSWSPCYDCARHVADFL
RGYPNLSLRIFTARLYFCDKERKAEPEGLRRLHRAGVQIAIMTFKDYFY
CWNTFVENHERTFKAWEGLHENSVRLSRQLRRILLPLYEVDDLRDAFRT
LGL
(underline: nuclear localization signal; double
underline: nuclear export signal)
Mouse APOBEC-3:
(SEQ ID NO: 267)
MGPFCLGCSHRKCYSPIRNLISQETFKFHFKNLGYAKGRKDTFLCYEVT
RKDCDSPVSLHHGVFKNKDNIHAEICFLYWFHDKVLKVLSPREEFKITW
YMSWSPCFECAEQIVRFLATHHNLSLDIFSSRLYNVQDPETQQNLCRLV
QEGAQVAAMDLYEFKKCWKKFVDNGGRRFRPWKRLLTNFRYQDSKLQEI
LRPCYIPVPSSSSSTLSNICLTKGLPETRFCVEGRRMDPLSEEEFYSQF
YNQRVKHLCYYHRMKPYLCYQLEQFNGQAPLKGCLLSEKGKQHAEILFL
DKIRSMELSQVTITCYLTWSPCPNCAWQLAAFKRDRPDLILHIYTSRLY
FHWKRPFQKGLCSLWQSGILVDVMDLPQFTDCWTNFVNPKRPFWPWKGL
EIISRRTQRRLRRIKESWGLQDLVNDFGNLQLGPPMS
(italic: nucleic acid editing domain)
Rat APOBEC-3:
(SEQ ID NO: 268)
MGPFCLGCSHRKCYSPIRNLISQETFKFHFKNLRYAIDRKDTFLCYEVT
RKDCDSPVSLHHGVFKNKDNIHAEICFLYWFHDKVLKVLSPREEFKITW
YMSWSPCFECAEQVLRFLATHHNLSLDIFSSRLYNIRDPENQQNLCRLV
QEGAQVAAMDLYEFKKCWKKFVDNGGRRFRPWKKLLTNFRYQDSKLQEI
LRPCYIPVPSSSSSTLSNICLTKGLPETRFCVERRRVHLLSEEEFYSQF
YNQRVKHLCYYHGVKPYLCYQLEQFNGQAPLKGCLLSEKGKQHAEILFL
DKIRSMELSQVIITCYLTWSPCPNCAWQLAAFKRDRPDLILHIYTSRLY
FHWKRPFQKGLCSLWQSGILVDVMDLPQFTDCWTNFVNPKRPFWPWKGL
EIISRRTQRRLHRIKESWGLQDLVNDFGNLQLGPPMS
(italic: nucleic acid editing domain)
Rhesus macaque APOBEC-3G:
(SEQ ID NO: 269)
MVEPMDPRTFVSNFNNRPILSGLNTVWLCCEVKTKDPSGPPLDAKIFQG
KVYSKAKYHPEMRFLRWFHKWRQLHHDQEYKVTWYVSWSPCTRCANSVA
TFLAKDPKVTLTIFVARLYYFWKPDYQQALRILCQKRGGPHATMKIMNY
NEFQDCWNKFVDGRGKPFKPRNNLPKHYTLLQATLGELLRHLMDPGTFT
SNFNNKPWVSGQHETYLCYKVERLHNDTWVPLNQHRGFLRNQAPNIFIG
FPKGRHAELCFLDHPFWKLDGQQYRVTCFTSWSPCFSCAQEMAKFISNN
EHVSLCIFAARIYDDQGRYQEGLRALHRDGAKIAMMNYSEFEYCWDTFV
DRQGRPFQPWDGLDEHSQALSGRLRAI
(italic: nucleic acid editing domain; underline:
cytoplasmic localization signal)
Chimpanzee APOBEC-3G:
(SEQ ID NO: 270)
MKPHFRNPVERMYQDTFSDNFYNRPILSHRNTVWLCYEVKTKGPSRPPL
DAKIFRGQVYSKLKYHPEAIRFFHWFSKWRKLHRDQEYEVTWYISWSPC
TKCTRDVATFLAEDPKVTLTIFVARLYYFWDPDYQEALRSLCQKRDGPR
ATMKIMNYDEFQHCWSKFVYSQRELFEPWNNLPKYYILLHIMLGEILRH
SMDPPTFTSNFNNELWVRGRHETYLCYEVERLHNDTWVLLNQRRGFLCN
QAPHKHGFLEGRHAELCFLDVIPFWKLDLHQDYRVTCFTSWSPCFSCAQ
EMAKFISNNKHVSLCIFAARIYDDQGRCQEGLRTLAKAGAKISIMTYSE
FKHCWDTFVDHQGCPFQPWDGLEEHSQALSGRLRAILQNQGN
(italic: nucleic acid editing domain; underline:
cytoplasmic localization signal)
Green monkey APOBEC-3G:
(SEQ ID NO: 271)
MNPQIRNMVEQMEPDIFVYYFNNRPILSGRNTVWLCYEVKTKDPSGPPL
DANIFQGKLYPEAKDHPEMKFLHWFRKWRQLHRDQEYEVTWYVSWSPCT
RCANSVATFLAEDPKVTLTIFVARLYYFWKPDYQQALRILCQERGGPHA
TMKIMNYNEFQHCWNEFVDGQGKPFKPRKNLPKHYTLLHATLGELLRHV
MDPGTFTSNFNNKPWVSGQRETYLCYKVERSHNDTWVLLNQHRGFLRNQ
APDRHGFPKGRHAELCFLDHPFWKLDDQQYRVTCFTSWSPCFSCAQKMA
KFISNNKHVSLCIFAARIYDDQGRCQEGLRTLHRDGAKIAVMNYSEFEY
CWDTFVDRQGRPFQPWDGLDEHSQALSGRLRAI
(italic: nucleic acid editing domain; underline:
cytoplasmic localization signal)
Human APOBEC-3G:
(SEQ ID NO: 272)
MKPHFRNTVERMYRDTFSYNFYNRPILSRRNTVWLCYEVKTKGPSRPPL
DAKIFRGQVYSELKYHPEMRFFHWFSKWRKLHRDQEYEVTWYISWSPCT
KCTRDMATFLAEDPKVTLTIFVARLYYFWDPDYQEALRSLCQKRDGPRA
TMKIMNYDEFQHCWSKFVYSQRELFEPWNNLPKYYILLHIMLGEILRHS
MDPPTFTFNFNNEPWVRGRHETYLCYEVERMHNDTWVLLNQRRGFLCNQ
APHKHGFLEGRHAELCFLDVIPFWKLDLDQDYRVTCFTSWSPCFSCAQE
MAKFISKNKHVSLCIFTARIYDDQGRCQEGLRTLAEAGAKISIMTYSEF
KHCWDTFVDHQGCPFQPWDGLDEHSQDLSGRLRAILQNQEN
(italic: nucleic acid editing domain; underline:
cytoplasmic localization signal)
Human APOBEC-3F:
(SEQ ID NO: 273)
MKPHFRNTVERMYRDTFSYNFYNRPILSRRNTVWLCYEVKTKGPSRPRL
DAKIFRGQVYSQPEHHAEMCFLSWFCGNQLPAYKCFQITWFVSWTPCPD
CVAKLAEFLAEHPNVTLTISAARLYYYWERDYRRALCRLSQAGARVKIM
DDEEFAYCWENFVYSEGQPFMPWYKFDDNYAFLHRTLKEILRNPMEAMY
PHIFYFHFKNLRKAYGRNESWLCFTMEVVKHHSPVSWKRGVFRNQVDPE
THCHAERCFLSWFCDDILSPNTNYEVTWYTSWSPCPECAGEVAEFLARH
SNVNLTIFTARLYYFWDTDYQEGLRSLSQEGASVEIIVIGYKDFKYCWE
NFVYNDDEPFKPWKGLKYNFLFLDSKLQEILE
(italic: nucleic acid editing domain)
Human APOBEC-3B:
(SEQ ID NO: 274)
MNPQIRNPMERMYRDTFYDNFENEPILYGRSYTWLCYEVKIKRGRSNLL
WDTGVFRGQVYFKPQYHAEMCFLSWFCGNQLPAYKCFQITWFVSWTPCP
DCVAKLAEFLSEHPNVTLTISAARLYYYWERDYRRALCRLSQAGARVTI
MDYEEFAYCWENFVYNEGQQFMPWYKFDENYAFLHRTLKEILRYLMDPD
TFTFNFNNDPLVLRRRQTYLCYEVERLDNGTWVLMDQHMGFLCNEAKNL
LCGFYGRHAELRFLDLVPSLQLDPAQIYRVTWFISWSPCFSWGCAGEVR
AFLQENTHVRLRIFAARIYDYDPLYKEALQMLRDAGAQVSIIVITYDEF
EYCWDTFVYRQGCPFQPWDGLEEHSQALSGRLRAILQNQGN
(italic: nucleic acid editing domain)
Human APOBEC-3C:
(SEQ ID NO: 275)
MNPQIRNPMKAMYPGTFYFQFKNLWEANDRNETWLCFTVEGIKRRSVVS
WKTGVFRNQVDSETHCHAERCFLSWFCDDILSPNTKYQVTWYTSWSPCP
DCAGEVAEFLARHSNVNLTIFTARLYYFQYPCYQEGLRSLSQEGVAVEI
MDYEDFKYCWENFVYNDNEPFKPWKGLKTNFRLLKRRLRESLQ
(italic: nucleic acid editing domain)
Human APOBEC-3A:
(SEQ ID NO: 276)
MEASPASGPRHLMDPHIFTSNFNNGIGREIKTYLCYEVERLDNGTSVKM
DQHRGFLHNQAKNLLCGFYGRHAELRFLDLVPSLQLDPAQIYRVTWFIS
WSPCFSWGCAGEVRAFLENTHVRLRIFAARIYDYDPLYKEALQMLRDAG
AQVSIMTYDEFKHCWDTFVDHQGCPFQPWDGLDEHSQALSGRLRAILQN
QGN
(italic: nucleic acid editing domain)
Human APOBEC-3H:
(SEQ ID NO: 277)
MALLTAETFRLQFNNKRRLRRPYYPRKALLCYQLTPQNGSTPTRGYFEN
KKKCHAEICFINEIKSMGLDETQCYQVTCYLTWSPCSSCAWELVDFIKA
HDHLNLGIFASRLYYHWKPQQKGLRLLCGSQVPVEVMGFPKFADCWENF
VDHEKPLSFNPYKMLEELDKNSRAIKRRLERIKIPGVRAQGRYMDILCD
AEV
(italic: nucleic acid editing domain)
Human APOBEC-3D:
(SEQ ID NO: 278)
MNPQIRNPMERMYRDTFYDNFENEPILYGRSYTWLCYEVKIKRGRSNLL
WDTGVFRGPVLPKRQSNHRQEVYFRFENHAEMCFLSWFCGNRLPANRRF
QITWFVSWNPCLPCVVKVTKFLAEHPNVTLTISAARLYYYRDRDWRWVL
LRLHKAGARVKIMDYEDFAYCWENFVCNEGQPFMPWYKFDDNYASLHRT
LKEILRNPMEAMYPHIFYFHPKNLLKACGRNESWLCFTMEVTKHHSAVF
RKRGVFRNQVDPETHCHAERCFLSWFCDDILSPNTNYEVTWYTSWSPCP
ECAGEVAEFLARHSNVNLTIFTARLCYFWDTDYQEGLCSLSQEGASVKI
IVIGYKDFVSCWKNFVYSDDEPFKPWKGLQTNFRLLKRRLREILQ
(italic: nucleic acid editing domain)
Human APOBEC-1:
(SEQ ID NO: 279)
MTSEKGPSTGDPTLRRRIEPWEFDVFYDPRELRKEACLLYEIKWGMSRK
IWRSSGKNTTNHVEVNFIKKFTSERDFHPSMSCSITWFLSWSPCWECSQ
AIREFLSRHPGVTLVIYVARLFWHMDQQNRQGLRDLVNSGVTIQIMRAS
EYYHCWRNFVNYPPGDEAHWPQYPPLWM MLYALELHCIlLSLPPCLKI
SRRWQNHLTFFRLHLQNCHYQTIPPHILLATGLIHPSVAWR
Mouse APOBEC-1:
(SEQ ID NO: 280)
MSSETGPVAVDPTLRRRIEPHEFEVFFDPRELRKETCLLYEINWGGRHS
VWRHTSQNTSNHVEVNFLEKFTTERYFRPNTRCSITWFLSWSPCGECSR
AITEFLSRHPYVTLFIYIARLYHHTDQRNRQGLRDLISSGVTIQIIVIT
EQEYCYCWRNFVNYPPSNEAYWPRYPHLWVKLYVLELYCIILGLPPCLK
ILRRKQPQLTFFTITLQTCHYQRIPPHLLWATGLK
Rat APOBEC-1:
(SEQ ID NO: 281)
MSSETGPVAVDPTLRRRIEPHEFEVFFDPRELRKETCLLYEINWGGRHS
IWRHTSQNTNKHVEVNFIEKFTTERYFCPNTRCSITWFLSWSPCGECSR
AITEFLSRYPHVTLFIYIARLYHHADPRNRQGLRDLISSGVTIQIIVIT
EQESGYCWRNFVNYSPSNEAHWPRYPHLWVRLYVLELYCIILGLPPCLN
ILRRKQPQLTFFTIALQSCHYQRLPPHILWATGLK

[0172] In some embodiments, fusion proteins as provided herein comprise the full-length amino acid of a effector domain, e.g., one of the sequences provided above. In other embodiments, however, fusion proteins as provided herein do not comprise a full-length sequence of a effector domain, but only a fragment thereof. For example, in some embodiments, a fusion protein provided herein comprises a Cas9 protein and a fragment of a effector domain, e.g., wherein the fragment comprises a effector domain. Exemplary amino acid sequences of effector domains are shown in the sequences above as italicized letters, and additional suitable sequences of such domains will be apparent to those of skill in the art.

[0173] Additional suitable nucleic-acid editing domain, e.g., deaminase domain sequences, that can be used according to aspects of this disclosure, e.g., that can be fused to a nuclease-inactive Cas9 protein, will be apparent to those of skill in the art based on this disclosure. In some embodiments, such additional domain sequences include deaminase domain sequences that are at least 70%, at least 75%, at least 80%, at least 85%, at least 90%, at least 95%, at least 96%, at least 97%, at least 98%, or at least 99% similar to the sequences provided herein. Additional suitable Cas9 proteins, variants, and sequences will also be apparent to those of skill in the art. Examples of such additional suitable Cas9 proteins include, but are not limited to Cas9 proteins with the following mutations: D10A, D10A/D839A/H840A, and D10A/D839A/H840A/N863A (See, e.g., Prashant et al., CAS9 transcriptional activators for target specificity screening and paired nickases for cooperative genome engineering. Nature Biotechnology. 2013; 31(9): 833-838 the entire contents of which are incorporated herein by reference).

[0174] Additional suitable strategies for generating fusion proteins comprising a Cas9 protein and an effector domain, such as a DNA-editing domain, will be apparent to those of skill in the art based on this disclosure in combination with the general knowledge in the art. Suitable strategies for generating fusion proteins according to aspects of this disclosure using linkers or without the use of linkers will also be apparent to those of skill in the art in view of the instant disclosure and the knowledge in the art. For example, Gilbert et al., CRISPR-mediated modular RNA-guided regulation of transcription in eukaryotes. Cell. 2013; 154(2):442-51, showed that C-terminal fusions of Cas9 with VP64 using 2 NLS's as a linker (SPKKKRKVEAS, SEQ ID NO: 284), can be employed for transcriptional activation. Mali et al., Cas9 transcriptional activators for target specificity screening and paired nickases for cooperative genome engineering. Nat Biotechnol. 2013; 31(9):833-8, reported that C-terminal fusions with VP64 without linker can be employed for transcriptional activation. And Maeder et al., CRISPR RNA-guided activation of endogenous human genes. Nat Methods. 2013; 10: 977-979, reported that C-terminal fusions with VP64 using a Gly₄Ser (SEQ ID NO: 5) linker can be used as transcriptional activators. Recently, dCas9-FokI nuclease fusions have successfully been generated and exhibit improved enzymatic specificity as compared to the parental Cas9 enzyme (In Guilinger J P, Thompson D B, Liu D R. Fusion of catalytically inactive Cas9 to FokI nuclease improves the specificity of genome modification. Nat. Biotechnol. 2014; 32(6):577-82, and in Tsai S Q, Wyvekens N, Khayter C, Foden J A, Thapar V, Reyon D, Goodwin M J, Aryee M J, Joung J K. Dimeric CRISPR RNA-guided FokI nucleases for highly specific genome editing. Nat. Biotechnol. 2014; 32(6):569-76. PMID: 24770325 a SGSETPGTSESATPES (SEQ ID NO: 7) or a GGGGS (SEQ ID NO: 5) linker was used in FokI-dCas9 fusion proteins, respectively).

[0175] In some embodiments, the Cas9 fusion protein comprises: (i) Cas9 protein; and (ii) a transcriptional activator domain. In some embodiments, the transcriptional activator domain comprises a VPR. VPR is a VP64-SV40-P65-RTA tripartite activator. In some embodiments, VPR comprises a VP64 amino acid sequence encoded by the nucleic acid sequence of SEQ ID NO: 292:

(SEQ ID NO: 292)
GAGGCCAGCGGTTCCGGACGGGCTGACGCATTGGACGATTTTGATCTGGA
TATGCTGGGAAGTGACGCCCTCGATGATTTTGACCTTGACATGCTTGGTT
CGGATGCCCTTGATGACTTTGACCTCGACATGCTCGGCAGTGACGCCCTT
GATGATTTCGACCTGGACATGCTGATTAACTCTAGATAG

[0176] In some embodiments, VPR comprises a VP64 amino acid sequence as set forth in SEQ ID NO: 293:

(SEQ ID NO: 293)
EASGSGRADALDDFDLDMLGSDALDDFDLDMLGSDALDDFDLDMLGSDAL
DDFDLDMLINSR

[0177] In some embodiments, VPR comprises a VP64-SV40-P65-RTA amino acid sequence encoded by the nucleic acid sequence of SEQ ID NO: 294:

(SEQ ID NO: 294)
TCGCCAGGGATCCGTCGACTTGACGCGTTGATATCAACAAGTTTGTACAA
AAAAGCAGGCTACAAAGAGGCCAGCGGTTCCGGACGGGCTGACGCATTGG
ACGATTTTGATCTGGATATGCTGGGAAGTGACGCCCTCGATGATTTTGAC
CTTGACATGCTTGGTTCGGATGCCCTTGATGACTTTGACCTCGACATGCT
CGGCAGTGACGCCCTTGATGATTTCGACCTGGACATGCTGATTAACTCTA
GAAGTTCCGGATCTCCGAAAAAGAAACGCAAAGTTGGTAGCCAGTACCTG
CCCGACACCGACGACCGGCACCGGATCGAGGAAAAGCGGAAGCGGACCTA
CGAGACATTCAAGAGCATCATGAAGAAGTCCCCCTTCAGCGGCCCCACCG
ACCCTAGACCTCCACCTAGAAGAATCGCCGTGCCCAGCAGATCCAGCGCC
AGCGTGCCAAAACCTGCCCCCCAGCCTTACCCCTTCACCAGCAGCCTGAG
CACCATCAACTACGACGAGTTCCCTACCATGGTGTTCCCCAGCGGCCAGA
TCTCTCAGGCCTCTGCTCTGGCTCCAGCCCCTCCTCAGGTGCTGCCTCAG
GCTCCTGCTCCTGCACCAGCTCCAGCCATGGTGTCTGCACTGGCTCAGGC
ACCAGCACCCGTGCCTGTGCTGGCTCCTGGACCTCCACAGGCTGTGGCTC
CACCAGCCCCTAAACCTACACAGGCCGGCGAGGGCACACTGTCTGAAGCT
CTGCTGCAGCTGCAGTTCGACGACGAGGATCTGGGAGCCCTGCTGGGAAA
CAGCACCGATCCTGCCGTGTTCACCGACCTGGCCAGCGTGGACAACAGCG
AGTTCCAGCAGCTGCTGAACCAGGGCATCCCTGTGGCCCCTCACACCACC
GAGCCCATGCTGATGGAATACCCCGAGGCCATCACCCGGCTCGTGACAGG
CGCTCAGAGGCCTCCTGATCCAGCTCCTGCCCCTCTGGGAGCACCAGGCC
TGCCTAATGGACTGCTGTCTGGCGACGAGGACTTCAGCTCTATCGCCGAT
ATGGATTTCTCAGCCTTGCTGGGCTCTGGCAGCGGCAGCCGGGATTCCAG
GGAAGGGATGTTTTTGCCGAAGCCTGAGGCCGGCTCCGCTATTAGTGACG
TGTTTGAGGGCCGCGAGGTGTGCCAGCCAAAACGAATCCGGCCATTTCAT
CCTCCAGGAAGTCCATGGGCCAACCGCCCACTCCCCGCCAGCCTCGCACC
AACACCAACCGGTCCAGTACATGAGCCAGTCGGGTCACTGACCCCGGCAC
CAGTCCCTCAGCCACTGGATCCAGCGCCCGCAGTGACTCCCGAGGCCAGT
CACCTGTTGGAGGATCCCGATGAAGAGACGAGCCAGGCTGTCAAAGCCCT
TCGGGAGATGGCCGATACTGTGATTCCCCAGAAGGAAGAGGCTGCAATCT
GTGGCCAAATGGACCTTTCCCATCCGCCCCCAAGGGGCCATCTGGATGAG
CTGACAACCACACTTGAGTCCATGACCGAGGATCTGAACCTGGACTCACC
CCTGACCCCGGAATTGAACGAGATTCTGGATACCTTCCTGAACGACGAGT
GCCTCTTGCATGCCATGCATATCAGCACAGGACTGTCCATCTTCGACACA
TCTCTGTTTTGA

[0178] In some embodiments, VPR comprises a VP64-SV40-P65-RTA amino acid sequence as set forth in SEQ ID NO: 295:

(SEQ ID NO: 295)
SPGIRRLDALISTSLYKKAGYKEASGSGRADALDDFDLDMLGSDALDDFD
LDMLGSDALDDFDLDMLGSDALDDFDLDMLINSRSSGSPKKKRKVGSQYL
PDTDDRHRIEEKRKRTYETFKSIMKKSPFSGPTDPRPPPRRIAVPSRSSA
SVPKPAPQPYPFTSSLSTINYDEFPTMVFPSGQISQASALAPAPPQVLPQ
APAPAPAPAMVSALAQAPAPVPVLAPGPPQAVAPPAPKPTQAGEGTLSEA
LLQLQFDDEDLGALLGNSTDPAVFTDLASVDNSEFQQLLNQGIPVAPHTT
EPMLMEYPEAITRLVTGAQRPPDPAPAPLGAPGLPNGLLSGDEDFSSIAD
MDFSALLGSGSGSRDSREGMFLPKPEAGSAISDVFEGREVCQPKRIRPFH
PPGSPWANRPLPASLAPTPTGPVHEPVGSLTPAPVPQPLDPAPAVTPEAS
HLLEDPDEETSQAVKALREMADTVIPQKEEAAICGQMDLSHPPPRGHLDE
LTTTLESMTEDLNLDSPLTPELNEILDTFLNDECLLHAMHISTGLSIFDT
SLF

[0179] Some aspects of this disclosure provide fusion proteins comprising a transcription activator. In some embodiments, the transcriptional activator is VPR. In some embodiments, the VPR comprises a wild type VPR or a VPR as set forth in SEQ ID NO: 293. In some embodiments, the VPR proteins provided herein include fragments of VPR and proteins homologous to a VPR or a VPR fragment. For example, in some embodiments, a VPR comprises a fragment of the amino acid sequence set forth in SEQ ID NO: 293. In some embodiments, a VPR comprises an amino acid sequence homologous to the amino acid sequence set forth in SEQ ID NO: 293 or an amino acid sequence homologous to a fragment of the amino acid sequence set forth in SEQ ID NO: 293. In some embodiments, proteins comprising VPR or fragments of VPR or homologs of VPR or VPR fragments are referred to as “VPR variants.” A VPR variant shares homology to VPR, or a fragment thereof. For example a VPR variant is at least about 70% identical, at least about 80% identical, at least about 90% identical, at least about 95% identical, at least about 96% identical, at least about 97% identical, at least about 98% identical, at least about 99% identical, at least about 99.5% identical, or at least about 99.9% to a wild type VPR or a VPR as set forth in SEQ ID NO: 293. In some embodiments, the VPR variant comprises a fragment of VPR, such that the fragment is at least about 70% identical, at least about 80% identical, at least about 90% identical, at least about 95% identical, at least about 96% identical, at least about 97% identical, at least about 98% identical, at least about 99% identical, at least about 99.5% identical, or at least about 99.9% to the corresponding fragment of wild type VPR or a VPR as set forth in SEQ ID NO: 293. In some embodiments, the VPR comprises the amino acid sequence set forth in SEQ ID NO: 293. In some embodiments, the VPR comprises an amino acid sequence encoded by the nucleotide sequence set forth in SEQ ID NO: 292. In some embodiments, a VPR is a VP64-SV40-P65-RTA triple activator. In some embodiments, the VP64-SV40-P65-RTA comprises a VP64-SV40-P65-RTA as set forth in SEQ ID NO: 295. In some embodiments, the VP64-SV40-P65-RTA proteins provided herein include fragments of VP64-SV40-P65-RTA and proteins homologous to a VP64-SV40-P65-RTA or a VP64-SV40-P65-RTA fragment. For example, in some embodiments, a VP64-SV40-P65-RTA comprises a fragment of the amino acid sequence set forth in SEQ ID NO: 295. In some embodiments, a VP64-SV40-P65-RTA comprises an amino acid sequence homologous to the amino acid sequence set forth in SEQ ID NO: 295 or an amino acid sequence homologous to a fragment of the amino acid sequence set forth in SEQ ID NO: 295. In some embodiments, proteins comprising VP64-SV40-P65-RTA or fragments of VP64-SV40-P65-RTA or homologs of VP64-SV40-P65-RTA or VP64-SV40-P65-RTA fragments are referred to as “VP64-SV40-P65-RTA variants.” A VP64-SV40-P65-RTA variant shares homology to VP64-SV40-P65-RTA, or a fragment thereof. For example a VP64-SV40-P65-RTA variant is at least about 70% identical, at least about 80% identical, at least about 90% identical, at least about 95% identical, at least about 96% identical, at least about 97% identical, at least about 98% identical, at least about 99% identical, at least about 99.5% identical, or at least about 99.9% to a VP64-SV40-P65-RTA as set forth in SEQ ID NO: 295. In some embodiments, the VP64-SV40-P65-RTA variant comprises a fragment of VP64-SV40-P65-RTA, such that the fragment is at least about 70% identical, at least about 80% identical, at least about 90% identical, at least about 95% identical, at least about 96% identical, at least about 97% identical, at least about 98% identical, at least about 99% identical, at least about 99.5% identical, or at least about 99.9% to the corresponding fragment of a VP64-SV40-P65-RTA as set forth in SEQ ID NO: 295. In some embodiments, the VP64-SV40-P65-RTA comprises the amino acid sequence set forth in SEQ ID NO: 295. In some embodiments, the VP64-SV40-P65-RTA comprises an amino acid sequence encoded by the nucleotide sequence set forth in SEQ ID NO: 294.

[0180] Some aspects of this disclosure provide fusion proteins comprising (i) a Cas9 protein; and (ii) a effector domain. In some aspects, the fusion proteins provided herein further include (iii) a DNA-binding protein, for example, a zinc-finger domain, a TALE, or a second Cas9 protein. Without wishing to be bound by any particular theory, fusing a DNA-binding protein (e.g., a second Cas9 protein) to a fusion protein comprising (i) a protein; and (ii) a effector domain may be useful for improving specificity of the fusion protein to a target nucleic acid sequence, or for improving specificity or binding affinity of the fusion protein to bind a target nucleic acid sequence that does not contain the canonical PAM (5′-NGG-3′) sequence. In some embodiments, the second Cas9 protein is any of the Cas9 proteins provided herein. In some embodiments, the second Cas9 protein is fused to the fusion protein N-terminal to the Cas9 protein. In some embodiments, the second Cas9 protein is fused to the fusion protein C-terminal to the Cas9 protein. In some embodiments, the Cas9 protein and the second Cas9 protein are fused via a linker.

[0181] Further provided herein are complexes comprising any of the fusion proteins provided herein, a first guide RNA bound to the Cas9 protein of the fusion protein, and a second guide RNA bound to the second Cas9 protein of the fusion protein. In some embodiments, the first guide RNA is about 15-100 nucleotides long and comprises a sequence of at least 10 contiguous nucleotides that is complementary to a first target sequence and the second guide RNA is about 15-100 nucleotides long and comprises a sequence of at least 10 contiguous nucleotides that is complementary to a second target sequence. In some embodiments, the first guide RNA and/or the second guide RNA is 15, 16, 17, 18, 19, 20, 21, 22, 23, 24, 25, 26, 27, 28, 29, 30, 31, 32, 33, 34, 35, 36, 37, 38, 39, 40, 41, 42, 43, 44, 45, 46, 47, 48, 49, or 50 nucleotides long. In some embodiments, the first guide RNA and the second guide RNA are different. In some embodiments, the first guide RNA comprises a sequence of 15, 16, 17, 18, 19, 20, 21, 22, 23, 24, 25, 26, 27, 28, 29, 30, 31, 32, 33, 34, 35, 36, 37, 38, 39, or 40 contiguous nucleotides that is complementary to a first target sequence, and wherein the second guide RNA comprises a sequence of 15, 16, 17, 18, 19, 20, 21, 22, 23, 24, 25, 26, 27, 28, 29, 30, 31, 32, 33, 34, 35, 36, 37, 38, 39, or 40 contiguous nucleotides that is complementary to a second target sequence. In some embodiments, the first target sequence and the second target sequence are different. In some embodiments, the first target sequence and the second target sequence are DNA sequences. In some embodiments, the first target sequence and the second target sequence are in the genome of a mammal. In some embodiments, the first target sequence and the second target sequence are in the genome of a human. In some embodiments, the first target sequence is within 30 nucleotides of the second target sequence. In some embodiments, the 3′ end of the first target sequence is not immediately adjacent to the canonical PAM sequence (5′-NGG-3′). In some embodiments, the 3′ end of the second target sequence is not immediately adjacent to the canonical PAM sequence (5′-NGG-3′).

[0182] In some embodiments, the general architecture of exemplary Cas9 fusion proteins provided herein is of the structure:

[0183] [NH₂]-[effector domain]-[Cas9]-[second Cas9 protein]-[COOH];

[0184] [NH₂]-[second Cas9 protein]-[Cas9]-[effector domain]-[COOH];

[0185] [NH₂]-[Cas9]-[effector domain]-[second Cas9 protein]-[COOH];

[0186] [NH₂]-[second Cas9 protein]-[effector or domain]-[Cas9]-[COOH];

[0187] [NH₂]-[UGI]-[effector domain]-[Cas9]-[second Cas9 protein]-[COOH];

[0188] [NH₂]-[UGI]-[second Cas9 protein]-[Cas9]-[effector domain]-[COOH];

[0189] [NH₂]-[UGI]-[Cas9]-[effector domain]-[second Cas9 protein]-[COOH];

[0190] [NH₂]-[UGI]-[second Cas9 protein]-[effector domain]-[Cas9]-[COOH];

[0191] [NH₂]-[effector domain]-[Cas9]-[second Cas9 protein]-[UGI]-[COOH];

[0192] [NH₂]-[second Cas9 protein]-[Cas9]-[effector domain]-[UGI]-[COOH];

[0193] [NH₂]-[Cas9]-[effector domain]-[second Cas9 protein]-[UGI]-[COOH]; or

[0194] [NH₂]-[second Cas9 protein]-[effector domain]-[Cas9]-[UGI]-[COOH];

wherein NH₂ is the N-terminus of the fusion protein, and COOH is the C-terminus of the fusion protein. In some embodiments, the “]-[” used in the general architecture above indicates the presence of an optional linker sequence. In other examples, the general architecture of exemplary Cas9 fusion proteins provided herein is of the structure:

[0195] [NH₂]-[effector domain]-[Cas9]-[second Cas9 protein]-[COOH];

[0196] [NH₂]-[second Cas9 protein]-[Cas9]-[effector domain]-[COOH];

[0197] [NH₂]-[Cas9]-[effector domain]-[second Cas9 protein]-[COOH];

[0198] [NH₂]-[second Cas9 protein]-[effector domain]-[Cas9]-[COOH];

[0199] [NH₂]-[UGI]-[effector domain]-[Cas9]-[second Cas9 protein]-[COOH],

[0200] [NH₂]-[UGI]-[second Cas9 protein]-[Cas9]-[effector domain]-[COOH];

[0201] [NH₂]-[UGI]-[Cas9]-[effector domain]-[second Cas9 protein]-[COOH];

[0202] [NH₂]-[UGI]-[second Cas9 protein]-[effector domain]-[Cas9]-[COOH];

[0203] [NH₂]-[effector domain]-[Cas9]-[second Cas9 protein]-[UGI]-[COOH];

[0204] [NH₂]-[second Cas9 protein]-[Cas9]-[effector domain]-[UGI]-[COOH];

[0205] [NH₂]-[Cas9]-[effector domain]-[second Cas9 protein]-[UGI]-[COOH]; or

[0206] [NH₂]-[second Cas9 protein]-[effector domain]-[Cas9]-[UGI]-[COOH];

wherein NH₂ is the N-terminus of the fusion protein, and COOH is the C-terminus of the fusion protein. In some embodiments, the “-” used in the general architecture above indicates the presence of an optional linker sequence. In some embodiments, the second Cas9 is a dCas9 protein. In some examples, the general architecture of exemplary Cas9 fusion proteins provided herein comprises a structure as shown in FIG. 8. It should be appreciated that any of the proteins provided in any of the general architectures of exemplary Cas9 fusion proteins may be connected by one or more of the linkers provided herein. In some embodiments, the linkers are the same. In some embodiments, the linkers are different. In some embodiments, one or more of the proteins provided in any of the general architectures of exemplary Cas9 fusion proteins are not fused via a linker. In some embodiments, the fusion proteins further comprise a nuclear targeting sequence, for example a nuclear localization sequence. In some embodiments, fusion proteins provided herein further comprise a nuclear localization sequence (NLS). In some embodiments, the NLS is fused to the N-terminus of the fusion protein. In some embodiments, the NLS is fused to the C-terminus of the fusion protein. In some embodiments, the NLS is fused to the N-terminus of the second Cas9 protein. In some embodiments, the NLS is fused to the C-terminus of the second Cas9 protein. In some embodiments, the NLS is fused to the N-terminus of the Cas9 protein. In some embodiments, the NLS is fused to the C-terminus of the Cas9 protein. In some embodiments, the NLS is fused to the N-terminus of the effector domain. In some embodiments, the NLS is fused to the C-terminus of the effector domain. In some embodiments, the NLS is fused to the N-terminus of the UGI protein. In some embodiments, the NLS is fused to the C-terminus of the UGI protein. In some embodiments, the NLS is fused to the fusion protein via one or more linkers. In some embodiments, the NLS is fused to the fusioin protein without a linker.

### Uracil Glycosylase Inhibitor Fusion Proteins

[0207] Some aspects of this disclosure provide fusion proteins comprising a Cas9 protein fused to a effector domain, e.g., a deaminase, and a uracil glycosylase inhibitor (UGI). In some embodiments, the fusion protein comprises the structure:

[0208] [deaminase]-[optional linker sequence]-[Cas9]-[optional linker sequence]-[UGI];

[0209] [deaminase]-[optional linker sequence]-[UGI]-[optional linker sequence]-[Cas9];

[0210] [UGI]-[optional linker sequence]-[deaminase]-[optional linker sequence]-[Cas9];

[0211] [UGI]-[optional linker sequence]-[Cas9]-[optional linker sequence]-[deaminase];

[0212] [Cas9]-[optional linker sequence]-[deaminase]-[optional linker sequence]-[UGI]; or

[0213] [Cas9]-[optional linker sequence]-[UGI]-[optional linker sequence]-[deaminase].

In some embodiments, the fusion proteins do not comprise a linker sequence. In some embodiments, one or both of the optional linker sequences are present.

[0214] In some embodiments, the fusion protein further comprises a second Cas9 protein. For example, the second Cas9 protein may be any of the Cas9 proteins provided herein. In some embodiments, fusion protein comprises the structure:

[0215] [deaminase]-[Cas9]-[UGI]; [deaminase]-[UGI]-[Cas9];

[0216] [UGI]-[deaminase]-[Cas9];

[0217] [UGI]-[Cas9]-[deaminase];

[0218] [Cas9]-[deaminase]-[UGI];

[0219] [Cas9]-[UGI]-[deaminase];

[0220] [second Cas9]-[deaminase]-[Cas9]-[UGI];

[0221] [second Cas9]-[deaminase]-[UGI]-[Cas9];

[0222] [second Cas9]-[UGI]-[deaminase]-[Cas9];

[0223] [second Cas9]-[UGI]-[Cas9]-[deaminase];

[0224] [second Cas9]-[Cas9]-[deaminase]-[UGI];

[0225] [second Cas9]-[Cas9]-[UGI]-[deaminase];

[0226] [deaminase]-[second Cas9]-[Cas9]-[UGI];

[0227] [deaminase]-[second Cas9]-[UGI]-[Cas9];

[0228] [UGI]-[second Cas9]-[deaminase]-[Cas9];

[0229] [UGI]-[second Cas9]-[Cas9]-[deaminase];

[0230] [Cas9]-[second Cas9]-[deaminase]-[UGI];

[0231] [Cas9]-[second Cas9]-[UGI]-[deaminase]

[0232] [deaminase]-[Cas9]-[second Cas9]-[UGI];

[0233] [deaminase]-[UGI]-[second Cas9]-[Cas9];

[0234] [UGI]-[deaminase]-[second Cas9]-[Cas9];

[0235] [UGI]-[Cas9]-[second Cas9]-[deaminase];

[0236] [Cas9]-[deaminase]-[second Cas9]-[UGI];

[0237] [Cas9]-[UGI]-[second Cas9]-[deaminase];

[0238] [deaminase]-[Cas9]-[UGI]-[second Cas9];

[0239] [deaminase]-[UGI]-[Cas9]-[second Cas9];

[0240] [UGI]-[deaminase]-[Cas9]-[second Cas9];

[0241] [UGI]-[Cas9]-[deaminase]-[second Cas9];

[0242] [Cas9]-[deaminase]-[UGI]-[second Cas9]; or

[0243] [Cas9]-[UGI]-[deaminase]-[second Cas9].

In some embodiments, the “-” used in the general architecture above indicates the presence of an optional linker sequence. In some embodiments, the fusion proteins comprising a UGI further comprise a nuclear targeting sequence, for example a nuclear localization sequence. In some embodiments, fusion proteins provided herein further comprise a nuclear localization sequence (NLS). In some embodiments, the NLS is fused to the N-terminus of the fusion protein. In some embodiments, the NLS is fused to the C-terminus of the fusion protein. In some embodiments, the NLS is fused to the N-terminus of the UGI protein. In some embodiments, the NLS is fused to the C-terminus of the UGI protein. In some embodiments, the NLS is fused to the N-terminus of the Cas9 protein. In some embodiments, the NLS is fused to the C-terminus of the Cas9 protein. In some embodiments, the NLS is fused to the N-terminus of the deaminase. In some embodiments, the NLS is fused to the C-terminus of the deaminase. In some embodiments, the NLS is fused to the N-terminus of the second Cas9. In some embodiments, the NLS is fused to the C-terminus of the second Cas9. In some embodiments, the NLS is fused to the fusion protein via one or more linkers. In some embodiments, the NLS is fused to the fusion protein without a linker.

[0244] In some embodiments, the UGI comprises a wild type UGI or a UGI as set forth in SEQ ID NO: 553. In some embodiments, the UGI proteins provided herein include fragments of UGI and proteins homologous to a UGI or a UGI fragment. For example, in some embodiments, a UGI comprises a fragment of the amino acid sequence set forth in SEQ ID NO: 553. In some embodiments, a UGI comprises an amino acid sequence homologous to the amino acid sequence set forth in SEQ ID NO: 553 or an amino acid sequence homologous to a fragment of the amino acid sequence set forth in SEQ ID NO: 553. In some embodiments, proteins comprising UGI or fragments of UGI or homologs of UGI or UGI fragments are referred to as “UGI variants.” A UGI variant shares homology to UGI, or a fragment thereof. For example a UGI variant is at least about 70% identical, at least about 80% identical, at least about 90% identical, at least about 95% identical, at least about 96% identical, at least about 97% identical, at least about 98% identical, at least about 99% identical, at least about 99.5% identical, or at least about 99.9% to a wild type UGI or a UGI as set forth in SEQ ID NO: 553. In some embodiments, the UGI variant comprises a fragment of UGI, such that the fragment is at least about 70% identical, at least about 80% identical, at least about 90% identical, at least about 95% identical, at least about 96% identical, at least about 97% identical, at least about 98% identical, at least about 99% identical, at least about 99.5% identical, or at least about 99.9% to the corresponding fragment of wild type UGI or a UGI as set forth in SEQ ID NO: 553. In some embodiments, the UGI comprises the following amino acid sequence: >sp|P14739|UNGI_BPPB2 Uracil-DNA glycosylase inhibitor MTNLSDIIEKETGKQLVIQESILMLPEEVEEVIGNKPESDILVHTAYDESTDENVMLLT SDAPEYKPWALVIQDSNGENKIKML (SEQ ID NO: 553)

[0245] Suitable UGI protein and nucleotide sequences are provided herein and additional suitable UGI sequences are known to those in the art, and include, for example, those published in Wang et al., Uracil-DNA glycosylase inhibitor gene of bacteriophage PBS2 encodes a binding protein specific for uracil-DNA glycosylase. J Biol. Chem. 264:1163-1171(1989); Lundquist et al., Site-directed mutagenesis and characterization of uracil-DNA glycosylase inhibitor protein. Role of specific carboxylic amino acids in complex formation with Escherichia coli uracil-DNA glycosylase. J Biol. Chem. 272:21408-21419(1997); Ravishankar et al., X-ray analysis of a complex of Escherichia coli uracil DNA glycosylase (EcUDG) with a proteinaceous inhibitor. The structure elucidation of a prokaryotic UDG. Nucleic Acids Res. 26:4880-4887(1998); and Putnam et al., Protein mimicry of DNA from crystal structures of the uracil-DNA glycosylase inhibitor protein and its complex with Escherichia coli uracil-DNA glycosylase. J Mol. Biol. 287:331-346(1999), the entire contents of each are incorporated herein by reference.

[0246] It should be appreciated that additional proteins may be uracil glycosylase inhibitors. For example, other proteins that are capable of inhibiting (e.g., sterically blocking) a uracil-DNA glycosylase base-excision repair enzyme are within the scope of this disclosure. In some embodiments, a uracil glycosylase inhibitor is a protein that binds DNA. In some embodiments, a uracil glycosylase inhibitor is a protein that binds single-stranded DNA. For example, a uracil glycosylase inhibitor may be a Erwinia tasmaniensis single-stranded binding protein. In some embodiments, the single-stranded binding protein comprises the amino acid sequence (SEQ ID NO: 303). In some embodiments, a uracil glycosylase inhibitor is a protein that binds uracil. In some embodiments, a uracil glycosylase inhibitor is a protein that binds uracil in DNA. In some embodiments, a uracil glycosylase inhibitor is a catalytically inactive uracil DNA-glycosylase protein. In some embodiments, a uracil glycosylase inhibitor is a catalytically inactive uracil DNA-glycosylase protein that does not excise uracil from the DNA. For example, a uracil glycosylase inhibitor is a UdgX. In some embodiments, the UdgX comprises the amino acid sequence (SEQ ID NO: 304). As another example, a uracil glycosylase inhibitor is a catalytically inactive UDG. In some embodiments, a catalytically inactive UDG comprises the amino acid sequence (SEQ ID NO: 305). It should be appreciated that other uracil glycosylase inhibitors would be apparent to the skilled artisan and are within the scope of this disclosure.

Erwinia tasmaniensis SSB (themostable single-
stranded DNA binding protein)
(SEQ ID NO: 303)
MASRGVNKVILVGNLGQDPEVRYMPNGGAVANITLATSESWRDKQTGETK
EKTEWHRVVLFGKLAEVAGEYLRKGSQVYIEGALQTRKWTDQAGVEKYTT
EVVVNVGGTMQMLGGRSQGGGASAGGQNGGSNNGWGQPQQPQGGNQFSGG
AQQQARPQQQPQQNNAPANNEPPIDFDDDIP
UdgX (binds to Uracil in DNA but does not excise)
(SEQ ID NO: 304)
MAGAQDFVPHTADLAELAAAAGECRGCGLYRDATQAVFGAGGRSARIMMI
GEQPGDKEDLAGLPFVGPAGRLLDRALEAADIDRDALYVTNAVKHFKFTR
AAGGKRRIHKTPSRTEVVACRPWLIAEMTSVEPDVVVLLGATAAKALLGN
DFRVTQHRGEVLHVDDVPGDPALVATVHPSSLLRGPKEERESAFAGLVDD
LRVAADVRP
UDG (catalytically inactive human UDG, binds to
Uracil in DNA but does not excise)
(SEQ ID NO: 305)
MIGQKTLYSFFSPSPARKRHAPSPEPAVQGTGVAGVPEESGDAAAIPAKK
APAGQEEPGTPPSSPLSAEQLDRIQRNKAAALLRLAARNVPVGFGESWKK
HLSGEFGKPYFIKLMGFVAEERKHYTVYPPPHQVFTWTQMCDIKDVKVVI
LGQEPYHGPNQAHGLCFSVQRPVPPPPSLENIYKELSTDIEDFVHPGHGD
LSGWAKQGVLLLNAVLTVRAHQANSHKERGWEQFTDAVVSWLNQNSNGLV
FLLWGSYAQKKGSAIDRKRHHVLQTAHPSPLSVYRGFFGCRHFSKTNELL
QKSGKKPIDWKEL

### High Fidelity Cas9

[0247] Some aspects of the disclosure provide high fidelity Cas9 proteins. In some embodiments, high fidelity Cas9 proteins have decreased electrostatic interactions between the Cas9 protein and a sugar-phosphate backbone of a DNA, as compared to a wild-type Cas9 domain. In some embodiments, any of the Cas9 proteins provided herein comprise one or more mutations that decrease the association between the Cas9 protein and a sugar-phosphate backbone of a DNA. In some embodiments, any of the Cas9 proteins provided herein comprise one or more mutations that decrease the association between the Cas9 protein and a sugar-phosphate backbone of a DNA by at least 5%, at least 10%, at least 15%, at least 20%, at least 25%, at least 30%, at least 35%, at least 40%, at least 45%, at least 50%, at least 60%, at least 70%, at least 80%, at least 90%, or at least 95%. In some embodiments, any of the Cas9 proteins provided herein comprise one or more of a N497X, a R661X, a Q695X, and/or a Q926X mutation of the amino acid sequence provided in SEQ ID NO: 9, or a corresponding mutation in any of the amino acid sequences provided in SEQ ID NOs: 10-262, wherein X is any amino acid. In some embodiments, any of the Cas9 proteins provided herein comprise one or more of a N497A, a R661A, a Q695A, and/or a Q926A mutation of the amino acid sequence provided in SEQ ID NO: 9, or a corresponding mutation in any of the amino acid sequences provided in SEQ ID NOs: 10-262. In some embodiments, the Cas9 protein comprises a D10A mutation of the amino acid sequence provided in SEQ ID NO: 9, or a corresponding mutation in any of the amino acid sequences provided in SEQ ID NOs: 10-262. In some embodiments, the Cas9 protein comprises the amino acid sequence as set forth in SEQ ID NO: 306. High fidelity Cas9 proteins have been described in the art and would be apparent to the skilled artisan. For example, high fidelity Cas9 proteins have been described in Kleinstiver, B. P., et al. “High-fidelity CRISPR-Cas9 nucleases with no detectable genome-wide off-target effects.” Nature 529, 490-495 (2016); and Slaymaker, I. M., et al. “Rationally engineered Cas9 nucleases with improved specificity.” Science 351, 84-88 (2015); the entire contents of each are incorporated herein by reference. It should be appreciated that, based on the present disclosure and knowledge in the art, that mutations in any Cas9 protein may be generated to make high fidelity Cas9 proteins that have decreased electrostatic interactions between the Cas9 protein and a sugar-phosphate backbone of a DNA, as compared to a wild-type Cas9 domain.

[0248] Cas9 domain where mutations relative to Cas9 of SEQ ID NO: 9 are shown in bold and underlines.

(SEQ ID NO: 306)
MDKKYSIGLDIGTNSVGWAVITDEYKVPSKKFKVLGNTDRHSIKKNLIGA
LLFDSGETAEATRLKRTARRRYTRRKNRICYLQEIFSNEMAKVDDSFFHR
LEESFLVEEDKKHERHPIFGNIVDEVAYHEKYPTIYHLRKKLVDSTDKAD
LRLIYLALAHMIKFRGHFLIEGDLNPDNSDVDKLFIQLVQTYNQLFEENP
INASGVDAKAILSARLSKSRRLENLIAQLPGEKKNGLFGNLIALSLGLTP
NFKSNFDLAEDAKLQLSKDTYDDDLDNLLAQIGDQYADLFLAAKNLSDAI
LLSDILRVNTEITKAPLSASMIKRYDEHHQDLTLLKALVRQQLPEKYKEI
FFDQSKNGYAGYIDGGASQEEFYKFIKPILEKMDGTEELLVKLNREDLLR
KQRTFDNGSIPHQIHLGELHAILRRQEDFYPFLKDNREKIEKILTFRIPY
YVGPLARGNSRFAWMTRKSEETITPWNFEEVVDKGASAQSFIERMTAFDK
NLPNEKVLPKHSLLYEYFTVYNELTKVKYVTEGMRKPAFLSGEQKKAIVD
LLFKTNRKVTVKQLKEDYFKKIECFDSVEISGVEDRFNASLGTYHDLLKI
IKDKDFLDNEENEDILEDIVLTLTLFEDREMIEERLKTYAHLFDDKVMKQ
LKRRRYTGWGALSRKLINGIRDKQSGKTILDFLKSDGFANRNFMALIHDD
SLTFKEDIQKAQVSGQGDSLHEHIANLAGSPAIKKGILQTVKVVDELVKV
MGRHKPENIVIEMARENQTTQKGQKNSRERMKRIEEGIKELGSQILKEHP
VENTQLQNEKLYLYYLQNGRDMYVDQELDINRLSDYDVDHIVPQSFLKDD
SIDNKVLTRSDKNRGKSDNVPSEEVVKKMKNYWRQLLNAKLITQRKFDNL
TKAERGGLSELDKAGFIKRQLVETRAITKHVAQILDSRMNTKYDENDKLI
REVKVITLKSKLVSDFRKDFQFYKVREINNYHHAHDAYLNAVVGTALIKK
YPKLESEFVYGDYKVYDVRKMIAKSEQEIGKATAKYFFYSNIMNFFKTEI
TLANGEIRKRPLIETNGETGEIVWDKGRDFATVRKVLSMPQVNIVKKTEV
QTGGFSKESILPKRNSDKLIARKKDWDPKKYGGFDSPTVAYSVLVVAKVE
KGKSKKLKSVKELLGITIMERSSFEKNPIDFLEAKGYKEVKKDLIIKLPK
YSLFELENGRKRMLASAGELQKGNELALPSKYVNFLYLASHYEKLKGSPE
DNEQKQLFVEQHKHYLDEIIEQISEFSKRVILADANLDKVLSAYNKHRDK
PIREQAENIIHLFTLTNLGAPAAFKYFDTTIDRKRYTSTKEVLDATLIHQ
SITGLYETRIDLSQLGGD

Cas9 Proteins with Reduced PAM Exclusivity

[0249] Some aspects of the disclosure provide Cas9 proteins that have different PAM specificities. Typically, Cas9 proteins, such as Cas9 from S. pyogenes (spCas9), require a canonical NGG PAM sequence to bind a particular nucleic acid region. This may limit the ability to of the Cas9 protein to bind to a particular nucleotide sequence within a genome. Accordingly, in some embodiments, any of the Cas proteins provided herein may be capable of binding a nucleotide sequence that does not contain a canonical (e.g., NGG) PAM sequence. For example, Cas9 proteins that bind non-canonical PAM sequences have been described in Kleinstiver, B. P., et al., “Engineered CRISPR-Cas9 nucleases with altered PAM specificities” Nature 523, 481-485 (2015); and Kleinstiver, B. P., et al., “Broadening the targeting range of Staphylococcus aureus CRISPR-Cas9 by modifying PAM recognition” Nature Biotechnology 33, 1293-1298 (2015); the entire contents of each are hereby incorporated by reference.

[0250] In some embodiments, the Cas9 protein is a Cas9 protein from Staphylococcus aureus (SaCas9). In some embodiments, the SaCas9 protein is a nuclease active SaCas9, a nuclease inactive SaCas9 (SaCas9d), or a SaCas9 nickase (SaCas9n). In some embodiments, the SaCas9 comprises the amino acid sequence SEQ ID NO: 307. In some embodiments, the SaCas9 comprises a N579X mutation of SEQ ID NO: 307, or a corresponding mutation in any of the amino acid sequences provided in SEQ ID NOs: 9-262, wherein X is any amino acid except for N. In some embodiments, the SaCas9 comprises a N579A mutation of SEQ ID NO: 307, or a corresponding mutation in any of the amino acid sequences provided in SEQ ID NOs: 10-262. In some embodiments, the SaCas9 protein, the SaCas9d protein, or the SaCas9n protein can bind to a nucleic acid sequence having a non-canonical PAM. In some embodiments, the SaCas9 protein, the SaCas9d protein, or the SaCas9n protein can bind to a nucleic acid sequence having a NNGRRT PAM sequence. In some embodiments, the SaCas9 protein comprises one or more of a E781X, N967X, or R1014X mutation of SEQ ID NO: 307, or a corresponding mutation in any of the amino acid sequences provided in SEQ ID NOs: 10-262, wherein X is any amino acid. In some embodiments, the SaCas9 protein comprises one or more of a E781K, N967K, or R1014H mutation of SEQ ID NO: 307, or one or more corresponding mutation in any of the amino acid sequences provided in SEQ ID NOs: 10-262. In some embodiments, the SaCas9 protein comprises a E781K, a N967K, and a R1014H mutation of SEQ ID NO: 307, or corresponding mutations in any of the amino acid sequences provided in SEQ ID NOs: 10-262. It should be appreciated that these mutations may be combined with any of the other mutations provided herein

[0251] In some embodiments, the Cas9 protein of any of the fusion proteins provided herein comprises an amino acid sequence that is at least 60%, at least 65%, at least 70%, at least 75%, at least 80%, at least 85%, at least 90%, at least 95%, at least 96%, at least 97%, at least 98%, at least 99%, or at least 99.5% identical to any one of SEQ ID NOs: 307-309. In some embodiments, the Cas9 protein of any of the fusion proteins provided herein comprises the amino acid sequence of any one of SEQ ID NOs: 307-309. In some embodiments, the Cas9 protein of any of the fusion proteins provided herein consists of the amino acid sequence of any one of SEQ ID NOs: 307-309.

Exemplary SaCas9 sequence
(SEQ ID NO: 307)
KRNYILGLDIGITSVGYGIIDYETRDVIDAGVRLFKEANVENNEGRRSKR
GARRLKRRRRHRIQRVKKLLFDYNLLTDHSELSGINPYEARVKGLSQKLS
EEEFSAALLHLAKRRGVHNVNEVEEDTGNELSTKEQISRNSKALEEKYVA
ELQLERLKKDGEVRGSINRFKTSDYVKEAKQLLKVQKAYHQLDQSFIDTY
IDLLETRRTYYEGPGEGSPFGWKDIKEWYEMLMGHCTYFPEELRSVKYAY
NADLYNALNDLNNLVITRDENEKLEYYEKFQIIENVFKQKKKPTLKQIAK
EILVNEEDIKGYRVTSTGKPEFTNLKVYHDIKDITARKEIIENAELLDQI
AKILTIYQSSEDIQEELTNLNSELTQEEIEQISNLKGYTGTHNLSLKAIN
LILDELWHTNDNQIAIFNRLKLVPKKVDLSQQKEIPTTLVDDFILSPVVK
RSFIQSIKVINAIIKKYGLPNDIIIELAREKNSKDAQKMINEMQKRNRQT
NERIEEIIRTTGKENAKYLIEKIKLHDMQEGKCLYSLEAIPLEDLLNNPF
NYEVDHIIPRSVSFDNSFNNKVLVKQEENSKKGNRTPFQYLSSSDSKISY
ETFKKHILNLAKGKGRISKTKKEYLLEERDINRFSVQKDFINRNLVDTRY
ATRGLMNLLRSYFRVNNLDVKVKSINGGFTSFLRRKWKFKKERNKGYKHH
AEDALIIANADFIFKEWKKLDKAKKVMENQMFEEKQAESMPEIETEQEYK
EIFITPHQIKHIKDFKDYKYSHRVDKKPNRELINDTLYSTRKDDKGNTLI
VNNLNGLYDKDNDKLKKLINKSPEKLLMYHHDPQTYQKLKLIMEQYGDEK
NPLYKYYEETGNYLTKYSKKDNGPVIKKIKYYGNKLNAHLDITDDYPNSR
NKVVKLSLKPYRFDVYLDNGVYKFVTVKNLDVIKKENYYEVNSKCYEEAK
KLKKISNQAEFIASFYNNDLIKINGELYRVIGVNNDLLNRIEVNMIDITY
REYLENMNDKRPPRIIKTIASKTQSIKKYSTDILGNLYEVKSKKHPQIIK
KG

[0252] Residue N579 of SEQ ID NO: 307, which is underlined and in bold, may be mutated (e.g., to a A579) to yield a SaCas9 nickase.

Exemplary SaCas9n sequence
(SEQ ID NO: 308)
KRNYILGLDIGITSVGYGIIDYETRDVIDAGVRLFKEANVENNEGRRSKR
GARRLKRRRRHRIQRVKKLLFDYNLLTDHSELSGINPYEARVKGLSQKLS
EEEFSAALLHLAKRRGVHNVNEVEEDTGNELSTKEQISRNSKALEEKYVA
ELQLERLKKDGEVRGSINRFKTSDYVKEAKQLLKVQKAYHQLDQSFIDTY
IDLLETRRTYYEGPGEGSPFGWKDIKEWYEMLMGHCTYFPEELRSVKYAY
NADLYNALNDLNNLVITRDENEKLEYYEKFQIIENVFKQKKKPTLKQIAK
EILVNEEDIKGYRVTSTGKPEFTNLKVYHDIKDITARKEIIENAELLDQI
AKILTIYQSSEDIQEELTNLNSELTQEEIEQISNLKGYTGTHNLSLKAIN
LILDELWHTNDNQIAIFNRLKLVPKKVDLSQQKEIPTTLVDDFILSPVVK
RSFIQSIKVINAIIKKYGLPNDIIIELAREKNSKDAQKMINEMQKRNRQT
NERIEEIIRTTGKENAKYLIEKIKLHDMQEGKCLYSLEAIPLEDLLNNPF
NYEVDHIIPRSVSFDNSFNNKVLVKQEEASKKGNRTPFQYLSSSDSKISY
ETFKKHILNLAKGKGRISKTKKEYLLEERDINRFSVQKDFINRNLVDTRY
ATRGLMNLLRSYFRVNNLDVKVKSINGGFTSFLRRKWKFKKERNKGYKHH
AEDALIIANADFIFKEWKKLDKAKKVMENQMFEEKQAESMPEIETEQEYK
EIFITPHQIKHIKDFKDYKYSHRVDKKPNRELINDTLYSTRKDDKGNTLI
VNNLNGLYDKDNDKLKKLINKSPEKLLMYHHDPQTYQKLKLIMEQYGDEK
NPLYKYYEETGNYLTKYSKKDNGPVIKKIKYYGNKLNAHLDITDDYPNSR
NKVVKLSLKPYRFDVYLDNGVYKFVTVKNLDVIKKENYYEVNSKCYEEAK
KLKKISNQAEFIASFYNNDLIKINGELYRVIGVNNDLLNRIEVNMIDITY
REYLENMNDKRPPRIIKTIASKTQSIKKYSTDILGNLYEVKSKKHPQIIK
KG.

[0253] Residue A579 of SEQ ID NO: 308, which can be mutated from N579 of SEQ ID NO: 307 to yield a SaCas9 nickase, is underlined and in bold.

Exemplary SaKKH Cas9
(SEQ ID NO: 309)
KRNYILGLDIGITSVGYGIIDYETRDVIDAGVRLFKEANVENNEGRRSKR
GARRLKRRRRHRIQRVKKLLFDYNLLTDHSELSGINPYEARVKGLSQKLS
EEEFSAALLHLAKRRGVHNVNEVEEDTGNELSTKEQISRNSKALEEKYVA
ELQLERLKKDGEVRGSINRFKTSDYVKEAKQLLKVQKAYHQLDQSFIDTY
IDLLETRRTYYEGPGEGSPFGWKDIKEWYEMLMGHCTYFPEELRSVKYAY
NADLYNALNDLNNLVITRDENEKLEYYEKFQIIENVFKQKKKPTLKQIAK
EILVNEEDIKGYRVTSTGKPEFTNLKVYHDIKDITARKEIIENAELLDQI
AKILTIYQSSEDIQEELTNLNSELTQEEIEQISNLKGYTGTHNLSLKAIN
LILDELWHTNDNQIAIFNRLKLVPKKVDLSQQKEIPTTLVDDFILSPVVK
RSFIQSIKVINAIIKKYGLPNDIIIELAREKNSKDAQKMINEMQKRNRQT
NERIEEIIRTTGKENAKYLIEKIKLHDMQEGKCLYSLEAIPLEDLLNNPF
NYEVDHIIPRSVSFDNSFNNKVLVKQEEASKKGNRTPFQYLSSSDSKISY
ETFKKHILNLAKGKGRISKTKKEYLLEERDINRFSVQKDFINRNLVDTRY
ATRGLMNLLRSYFRVNNLDVKVKSINGGFTSFLRRKWKFKKERNKGYKHH
AEDALIIANADFIFKEWKKLDKAKKVMENQMFEEKQAESMPEIETEQEYK
EIFITPHQIKHIKDFKDYKYSHRVDKKPNRKLINDTLYSTRKDDKGNTLI
VNNLNGLYDKDNDKLKKLINKSPEKLLMYHHDPQTYQKLKLIMEQYGDEK
NPLYKYYEETGNYLTKYSKKDNGPVIKKIKYYGNKLNAHLDITDDYPNSR
NKVVKLSLKPYRFDVYLDNGVYKFVTVKNLDVIKKENYYEVNSKCYEEAK
KLKKISNQAEFIASFYKNDLIKINGELYRVIGVNNDLLNRIEVNMIDITY
REYLENMNDKRPPHIIKTIASKTQSIKKYSTDILGNLYEVKSKKHPQIIK
KG.

[0254] Residue A579 of SEQ ID NO: 309, which can be mutated from N579 of SEQ ID NO: 307 to yield a SaCas9 nickase, is underlined and in bold. Residues K781, K967, and H1014 of SEQ ID NO: 309, which can be mutated from E781, N967, and R1014 of SEQ ID NO: 307 to yield a SaKKH Cas9 are underlined and in italics.

[0255] In some embodiments, the Cas9 protein is a Cas9 protein from Streptococcus pyogenes (SpCas9). In some embodiments, the SpCas9 protein is a nuclease active SpCas9, a nuclease inactive SpCas9 (SpCas9d), or a SpCas9 nickase (SpCas9n). In some embodiments, the SpCas9 comprises the amino acid sequence SEQ ID NO: 9. In some embodiments, the SpCas9 comprises a D10X mutation of SEQ ID NO: 9, or a corresponding mutation in any of the amino acid sequences provided in SEQ ID NOs: 10-262, wherein X is any amino acid except for D. In some embodiments, the SpCas9 comprises a D10A mutation of SEQ ID NO: 9, or a corresponding mutation in any of the amino acid sequences provided in SEQ ID NOs: 10-262. In some embodiments, the SpCas9 protein, the SpCas9d protein, or the SpCas9n protein can bind to a nucleic acid sequence having a non-canonical PAM. In some embodiments, the SpCas9 protein, the SpCas9d protein, or the SpCas9n protein can bind to a nucleic acid sequence having a NGG, a NGA, or a NGCG PAM sequence. In some embodiments, the SpCas9 protein comprises one or more of a D1135X, R1335X, and T1337X mutation of SEQ ID NO: 9, or a corresponding mutation in any of the amino acid sequences provided in SEQ ID NOs: 10-262, wherein X is any amino acid. In some embodiments, the SpCas9 protein comprises one or more of a D1135E, R1335Q, and T1337R mutation of SEQ ID NO: 9, or a corresponding mutation in any of the amino acid sequences provided in SEQ ID NOs: 10-262. In some embodiments, the SpCas9 protein comprises a D1135E, a R1335Q, and a T1335R mutation of SEQ ID NO: 9, or corresponding mutations in any of the amino acid sequences provided in SEQ ID NOs: 10-262. In some embodiments, the SpCas9 protein comprises one or more of a D1135X, R1335X, and T1337X mutation of SEQ ID NO: 9, or a corresponding mutation in any of the amino acid sequences provided in SEQ ID NOs: 10-262, wherein X is any amino acid. In some embodiments, the SpCas9 protein comprises one or more of a D1135V, R1335Q, and T1337R mutation of SEQ ID NO: 9, or a corresponding mutation in any of the amino acid sequences provided in SEQ ID NOs: 10-262. In some embodiments, the SpCas9 protein comprises a D1135V, a R1335Q, and a T1337R mutation of SEQ ID NO: 9, or corresponding mutations in any of the amino acid sequences provided in SEQ ID NOs: 10-262. In some embodiments, the SpCas9 protein comprises one or more of a D1135X, G1218X, R1335X, and T1337X mutation of SEQ ID NO: 9, or a corresponding mutation in any of the amino acid sequences provided in SEQ ID NOs: 10-262, wherein X is any amino acid. In some embodiments, the SpCas9 protein comprises one or more of a D1135V, G1218R, R1335Q, and T1337R mutation of SEQ ID NO: 9, or a corresponding mutation in any of the amino acid sequences provided in SEQ ID NOs: 10-262. In some embodiments, the SpCas9 protein comprises a D1135V, a G1218R, a R1335Q, and a T1337R mutation of SEQ ID NO: 9, or corresponding mutations in any of the amino acid sequences provided in SEQ ID NOs: 10-262. It should be appreciated that these mutations may be combined with any of the other mutations provided herein

[0256] In some embodiments, the Cas9 protein of any of the fusion proteins provided herein comprises an amino acid sequence that is at least 60%, at least 65%, at least 70%, at least 75%, at least 80%, at least 85%, at least 90%, at least 95%, at least 96%, at least 97%, at least 98%, at least 99%, or at least 99.5% identical to any one of SEQ ID NOs: 9, 310-313. In some embodiments, the Cas9 domain of any of the fusion proteins provided herein comprises the amino acid sequence of any one of SEQ ID NOs: 9, 310-313. In some embodiments, the Cas9 domain of any of the fusion proteins provided herein consists of the amino acid sequence of any one of SEQ ID NOs: 9, 310-313.

Exemplary SpCas9
(SEQ ID NO: 9)
[sequence omitted]
Exemplary SpCas9n
(SEQ ID NO: 10)
DKKYSIGLAIGTNSVGWAVITDEYKVPSKKFKVLGNTDRHSIKKNLIGAL
LFDSGETAEATRLKRTARRRYTRRKNRICYLQEIFSNEMAKVDDSFFHRL
EESFLVEEDKKHERHPIFGNIVDEVAYHEKYPTIYHLRKKLVDSTDKADL
RLIYLALAHMIKFRGHFLIEGDLNPDNSDVDKLFIQLVQTYNQLFEENPI
NASGVDAKAILSARLSKSRRLENLIAQLPGEKKNGLFGNLIALSLGLTPN
FKSNFDLAEDAKLQLSKDTYDDDLDNLLAQIGDQYADLFLAAKNLSDAIL
LSDILRVNTEITKAPLSASMIKRYDEHHQDLTLLKALVRQQLPEKYKEIF
FDQSKNGYAGYIDGGASQEEFYKFIKPILEKMDGTEELLVKLNREDLLRK
QRTFDNGSIPHQIHLGELHAILRRQEDFYPFLKDNREKIEKILTFRIPYY
VGPLARGNSRFAWMTRKSEETITPWNFEEVVDKGASAQSFIERMTNFDKN
LPNEKVLPKHSLLYEYFTVYNELTKVKYVTEGMRKPAFLSGEQKKAIVDL
LFKTNRKVTVKQLKEDYFKKIECFDSVEISGVEDRFNASLGTYHDLLKII
KDKDFLDNEENEDILEDIVLTLTLFEDREMIEERLKTYAHLFDDKVMKQL
KRRRYTGWGRLSRKLINGIRDKQSGKTILDFLKSDGFANRNFMQLIHDDS
LTFKEDIQKAQVSGQGDSLHEHIANLAGSPAIKKGILQTVKVVDELVKVM
GRHKPENIVIEMARENQTTQKGQKNSRERMKRIEEGIKELGSQILKEHPV
ENTQLQNEKLYLYYLQNGRDMYVDQELDINRLSDYDVDHIVPQSFLKDDS
IDNKVLTRSDKNRGKSDNVPSEEVVKKMKNYWRQLLNAKLITQRKFDNLT
KAERGGLSELDKAGFIKRQLVETRQITKHVAQILDSRMNTKYDENDKLIR
EVKVITLKSKLVSDFRKDFQFYKVREINNYHHAHDAYLNAVVGTALIKKY
PKLESEFVYGDYKVYDVRKMIAKSEQEIGKATAKYFFYSNIMNFFKTEIT
LANGEIRKRPLIETNGETGEIVWDKGRDFATVRKVLSMPQVNIVKKTEVQ
TGGFSKESILPKRNSDKLIARKKDWDPKKYGGFDSPTVAYSVLVVAKVEK
GKSKKLKSVKELLGITIMERSSFEKNPIDFLEAKGYKEVKKDLIIKLPKY
SLFELENGRKRMLASAGELQKGNELALPSKYVNFLYLASHYEKLKGSPED
NEQKQLFVEQHKHYLDEIIEQISEFSKRVILADANLDKVLSAYNKHRDKP
IREQAENIIHLFTLTNLGAPAAFKYFDTTIDRKRYTSTKEVLDATLIHQS
ITGLYETRIDLSQLGGD
Exemplary SpEQR Cas9
(SEQ ID NO: 311)
DKKYSIGLAIGTNSVGWAVITDEYKVPSKKFKVLGNTDRHSIKKNLIGAL
LFDSGETAEATRLKRTARRRYTRRKNRICYLQEIFSNEMAKVDDSFFHRL
EESFLVEEDKKHERHPIFGNIVDEVAYHEKYPTIYHLRKKLVDSTDKADL
RLIYLALAHMIKFRGHFLIEGDLNPDNSDVDKLFIQLVQTYNQLFEENPI
NASGVDAKAILSARLSKSRRLENLIAQLPGEKKNGLFGNLIALSLGLTPN
FKSNFDLAEDAKLQLSKDTYDDDLDNLLAQIGDQYADLFLAAKNLSDAIL
LSDILRVNTEITKAPLSASMIKRYDEHHQDLTLLKALVRQQLPEKYKEIF
FDQSKNGYAGYIDGGASQEEFYKFIKPILEKMDGTEELLVKLNREDLLRK
QRTFDNGSIPHQIHLGELHAILRRQEDFYPFLKDNREKIEKILTFRIPYY
VGPLARGNSRFAWMTRKSEETITPWNFEEVVDKGASAQSFIERMTNFDKN
LPNEKVLPKHSLLYEYFTVYNELTKVKYVTEGMRKPAFLSGEQKKAIVDL
LFKTNRKVTVKQLKEDYFKKIECFDSVEISGVEDRFNASLGTYHDLLKII
KDKDFLDNEENEDILEDIVLTLTLFEDREMIEERLKTYAHLFDDKVMKQL
KRRRYTGWGRLSRKLINGIRDKQSGKTILDFLKSDGFANRNFMQLIHDDS
LTFKEDIQKAQVSGQGDSLHEHIANLAGSPAIKKGILQTVKVVDELVKVM
GRHKPENIVIEMARENQTTQKGQKNSRERMKRIEEGIKELGSQILKEHPV
ENTQLQNEKLYLYYLQNGRDMYVDQELDINRLSDYDVDHIVPQSFLKDDS
IDNKVLTRSDKNRGKSDNVPSEEVVKKMKNYWRQLLNAKLITQRKEDNLT
KAERGGLSELDKAGFIKRQLVETRQITKHVAQILDSRMNTKYDENDKLIR
EVKVITLKSKLVSDFRKDFQFYKVREINNYHHAHDAYLNAVVGTALIKKY
PKLESEFVYGDYKVYDVRKMIAKSEQEIGKATAKYFFYSNIMNFFKTEIT
LANGEIRKRPLIETNGETGEIVWDKGRDFATVRKVLSMPQVNIVKKTEVQ
TGGFSKESILPKRNSDKLIARKKDWDPKKYGGFESPTVAYSVLVVAKVEK
GKSKKLKSVKELLGITIMERSSFEKNPIDFLEAKGYKEVKKDLIIKLPKY
SLFELENGRKRMLASAGELQKGNELALPSKYVNFLYLASHYEKLKGSPED
NEQKQLFVEQHKHYLDEIIEQISEFSKRVILADANLDKVLSAYNKHRDKP
IREQAENIIHLFTLTNLGAPAAFKYFDTTIDRKQYRSTKEVLDATLIHQS
ITGLYETRIDLSQLGGD

[0257] Residues E1134, Q1334, and R1336 of SEQ ID NO: 311, which can be mutated from D1134, R1334, and T1336 of SEQ ID NO: 9 to yield a SpEQR Cas9, are underlined and in bold.

Exemplary SpVQR Cas9
(SEQ ID NO: 312)
DKKYSIGLAIGTNSVGWAVITDEYKVPSKKFKVLGNTDRHSIKKNLIGAL
LFDSGETAEATRLKRTARRRYTRRKNRICYLQEIFSNEMAKVDDSFFHRL
EESFLVEEDKKHERHPIFGNIVDEVAYHEKYPTIYHLRKKLVDSTDKADL
RLIYLALAHMIKFRGHFLIEGDLNPDNSDVDKLFIQLVQTYNQLFEENPI
NASGVDAKAILSARLSKSRRLENLIAQLPGEKKNGLFGNLIALSLGLTPN
FKSNFDLAEDAKLQLSKDTYDDDLDNLLAQIGDQYADLFLAAKNLSDAIL
LSDILRVNTEITKAPLSASMIKRYDEHHQDLTLLKALVRQQLPEKYKEIF
FDQSKNGYAGYIDGGASQEEFYKFIKPILEKMDGTEELLVKLNREDLLRK
QRTFDNGSIPHQIHLGELHAILRRQEDFYPFLKDNREKIEKILTFRIPYY
VGPLARGNSRFAWMTRKSEETITPWNFEEVVDKGASAQSFIERMTNFDKN
LPNEKVLPKHSLLYEYFTVYNELTKVKYVTEGMRKPAFLSGEQKKAIVDL
LFKTNRKVTVKQLKEDYFKKIECFDSVEISGVEDRFNASLGTYHDLLKII
KDKDFLDNEENEDILEDIVLTLTLFEDREMIEERLKTYAHLFDDKVMKQL
KRRRYTGWGRLSRKLINGIRDKQSGKTILDFLKSDGFANRNFMQLIHDDS
LTFKEDIQKAQVSGQGDSLHEHIANLAGSPAIKKGILQTVKVVDELVKVM
GRHKPENIVIEMARENQTTQKGQKNSRERMKRIEEGIKELGSQILKEHPV
ENTQLQNEKLYLYYLQNGRDMYVDQELDINRLSDYDVDHIVPQSFLKDDS
IDNKVLTRSDKNRGKSDNVPSEEVVKKMKNYWRQLLNAKLITQRKFDNLT
KAERGGLSELDKAGFIKRQLVETRQITKHVAQILDSRMNTKYDENDKLIR
EVKVITLKSKLVSDFRKDFQFYKVREINNYHHAHDAYLNAVVGTALIKKY
PKLESEFVYGDYKVYDVRKMIAKSEQEIGKATAKYFFYSNIMNFFKTEIT
LANGEIRKRPLIETNGETGEIVWDKGRDFATVRKVLSMPQVNIVKKTEVQ
TGGFSKESILPKRNSDKLIARKKDWDPKKYGGFVSPTVAYSVLVVAKVEK
GKSKKLKSVKELLGITIMERSSFEKNPIDFLEAKGYKEVKKDLIIKLPKY
SLFELENGRKRMLASAGELQKGNELALPSKYVNFLYLASHYEKLKGSPED
NEQKQLFVEQHKHYLDEIIEQISEFSKRVILADANLDKVLSAYNKHRDKP
IREQAENIIHLFTLTNLGAPAAFKYFDTTIDRKQYRSTKEVLDATLIHQS
ITGLYETRIDLSQLGGD

[0258] Residues V1134, Q1334, and R1336 of SEQ ID NO: 312, which can be mutated from D1134, R1334, and T1336 of SEQ ID NO: 9 to yield a SpVQR Cas9, are underlined and in bold.

Exemplary SpVRER Cas9
(SEQ ID NO: 313)
DKKYSIGLAIGTNSVGWAVITDEYKVPSKKFKVLGNTDRHSIKKNLIGAL
LFDSGETAEATRLKRTARRRYTRRKNRICYLQEIFSNEMAKVDDSFFHRL
EESFLVEEDKKHERHPIFGNIVDEVAYHEKYPTIYHLRKKLVDSTDKADL
RLIYLALAHMIKFRGHFLIEGDLNPDNSDVDKLFIQLVQTYNQLFEENPI
NASGVDAKAILSARLSKSRRLENLIAQLPGEKKNGLFGNLIALSLGLTPN
FKSNFDLAEDAKLQLSKDTYDDDLDNLLAQIGDQYADLFLAAKNLSDAIL
LSDILRVNTEITKAPLSASMIKRYDEHHQDLTLLKALVRQQLPEKYKEIF
FDQSKNGYAGYIDGGASQEEFYKFIKPILEKMDGTEELLVKLNREDLLRK
QRTFDNGSIPHQIHLGELHAILRRQEDFYPFLKDNREKIEKILTFRIPYY
VGPLARGNSRFAWMTRKSEETITPWNFEEVVDKGASAQSFIERMTNFDKN
LPNEKVLPKHSLLYEYFTVYNELTKVKYVTEGMRKPAFLSGEQKKAIVDL
LFKTNRKVTVKQLKEDYFKKIECFDSVEISGVEDRFNASLGTYHDLLKII
KDKDFLDNEENEDILEDIVLTLTLFEDREMIEERLKTYAHLFDDKVMKQL
KRRRYTGWGRLSRKLINGIRDKQSGKTILDFLKSDGFANRNFMQLIHDDS
LTFKEDIQKAQVSGQGDSLHEHIANLAGSPAIKKGILQTVKVVDELVKVM
GRHKPENIVIEMARENQTTQKGQKNSRERMKRIEEGIKELGSQILKEHPV
ENTQLQNEKLYLYYLQNGRDMYVDQELDINRLSDYDVDHIVPQSFLKDDS
IDNKVLTRSDKNRGKSDNVPSEEVVKKMKNYWRQLLNAKLITQRKFDNLT
KAERGGLSELDKAGFIKRQLVETRQITKHVAQILDSRMNTKYDENDKLIR
EVKVITLKSKLVSDFRKDFQFYKVREINNYHHAHDAYLNAVVGTALIKKY
PKLESEFVYGDYKVYDVRKMIAKSEQEIGKATAKYFFYSNIMNFFKTEIT
LANGEIRKRPLIETNGETGEIVWDKGRDFATVRKVLSMPQVNIVKKTEVQ
TGGFSKESILPKRNSDKLIARKKDWDPKKYGGFVSPTVAYSVLVVAKVEK
GKSKKLKSVKELLGITIMIERSSFEKNPIDFLEAKGYKEVKKDLIIKLPK
YSLFELENGRKRMLASARELQKGNELALPSKYVNFLYLASHYEKLKGSPE
DNEQKQLFVEQHKHYLDEIIEQISEFSKRVILADANLDKVLSAYNKHRDK
PIREQAENIIHLFTLTNLGAPAAFKYFDTTIDRKEYRSTKEVLDATLIHQ
SITGLYETRIDLSQLGGD

[0259] Residues V1134, R1217, Q1334, and R1336 of SEQ ID NO: 313, which can be mutated from D1134, G1217, R1334, and T1336 of SEQ ID NO: 9 to yield a SpVRER Cas9, are underlined and in bold.

Cas9 Complexes with Guide RNAs

[0260] Some aspects of this disclosure provide complexes comprising a Cas9 protein or a Cas9 fusion protein as provided herein, and a guide RNA bound to the Cas9 protein or the Cas9 fusion protein. In some embodiments, the guide RNA is about 15-100 nucleotides long and comprises a sequence of at least 10 contiguous nucleotides that is complementary to a target sequence. In some embodiments, the guide RNA is 15, 16, 17, 18, 19, 20, 21, 22, 23, 24, 25, 26, 27, 28, 29, 30, 31, 32, 33, 34, 35, 36, 37, 38, 39, 40, 41, 42, 43, 44, 45, 46, 47, 48, 49, or 50 nucleotides long. In some embodiments, the guide RNA comprises a sequence of 15, 16, 17, 18, 19, 20, 21, 22, 23, 24, 25, 26, 27, 28, 29, 30, 31, 32, 33, 34, 35, 36, 37, 38, 39, or 40 contiguous nucleotides that is complementary to a target sequence. In some embodiments, the target sequence is a DNA sequence. In some embodiments, the target sequence is a sequence in the genome of a mammal. In some embodiments, the target sequence is a sequence in the genome of a human. In some embodiments, the 3′ end of the target sequence is not immediately adjacent to the canonical PAM sequence (5′-NGG-3′).

[0261] Some aspects of the disclosure provide complexes comprising a first guide RNA bound to a Cas9 protein of a fusion protein, and a second guide RNA bound to a second Cas9 protein of the fusion protein. In some embodiments, the first guide RNA is about 15-100 nucleotides long and comprises a sequence of at least 10 contiguous nucleotides that is complementary to a first target sequence and the second guide RNA is about 15-100 nucleotides long and comprises a sequence of at least 10 contiguous nucleotides that is complementary to a second target sequence. In some embodiments, the first guide RNA and/or the second guide RNA is 15, 16, 17, 18, 19, 20, 21, 22, 23, 24, 25, 26, 27, 28, 29, 30, 31, 32, 33, 34, 35, 36, 37, 38, 39, 40, 41, 42, 43, 44, 45, 46, 47, 48, 49, or 50 nucleotides long. In some embodiments, the first guide RNA and the second guide RNA are different. In some embodiments, the first guide RNA comprises a sequence of 15, 16, 17, 18, 19, 20, 21, 22, 23, 24, 25, 26, 27, 28, 29, 30, 31, 32, 33, 34, 35, 36, 37, 38, 39, or 40 contiguous nucleotides that is complementary to a first target sequence and wherein the second guide RNA comprises a sequence of 15, 16, 17, 18, 19, 20, 21, 22, 23, 24, 25, 26, 27, 28, 29, 30, 31, 32, 33, 34, 35, 36, 37, 38, 39, or 40 contiguous nucleotides that is complementary to a second target sequence.

[0262] In some embodiments, first target sequence and the second target sequence are different. In some embodiments, the first target sequence and the second target sequence are DNA sequences. In some embodiments, the first target sequence and the second target sequence are in the genome of a mammal. In some embodiments, the first target sequence and the second target sequence are in the genome of a human. In some embodiments, the first target sequence is within at least 5, 10, 15, 20, 25, 30, 35, 40, 45, 50, 60, 70, 80, 90, 100, 150, or 200 nucleotides of the second target sequence. In some embodiments, the 3′-end of the first target sequence is not immediately adjacent to the canonical PAM sequence (5′-NGG-3′). In some embodiments, the 3′-end of the second target sequence is not immediately adjacent to the canonical PAM sequence (5′-NGG-3′).

### Methods of Using Cas9 Fusion Proteins

[0263] Some aspects of this disclosure provide methods of using the Cas9 proteins, fusion proteins, or complexes provided herein. For example, some aspects of this disclosure provide methods comprising contacting a DNA molecule (a) with any of the the Cas9 proteins or fusion proteins provided herein, and with at least one guide RNA, wherein the guide RNA is about 15-100 nucleotides long and comprises a sequence of at least 10 contiguous nucleotides that is complementary to a target sequence; or (b) with a Cas9 protein, a Cas9 fusion protein, or a Cas9 protein or fusion protein complex with at least one gRNA as provided herein. In some embodiments, the 3′ end of the target sequence is not immediately adjacent to the canonical PAM sequence (5′-NGG-3′). In some embodiments, the 3′ end of the target sequence is immediately adjacent to an AGC, GAG, TTT, GTG, or CAA sequence.

[0264] In some embodiments, the target DNA sequence comprises a sequence associated with a disease or disorder. In some embodiments, the target DNA sequence comprises a point mutation associated with a disease or disorder. In some embodiments, the activity of the Cas9 protein, the Cas9 fusion protein, or the complex results in a correction of the point mutation. In some embodiments, the target DNA sequence comprises a T-C point mutation associated with a disease or disorder, and wherein the deamination of the mutant C base results in a sequence that is not associated with a disease or disorder. In some embodiments, the target DNA sequence encodes a protein and wherein the point mutation is in a codon and results in a change in the amino acid encoded by the mutant codon as compared to the wild-type codon. In some embodiments, the deamination of the mutant C results in a change of the amino acid encoded by the mutant codon. In some embodiments, the deamination of the mutant C results in the codon encoding the wild-type amino acid. In some embodiments, the contacting is in vivo in a subject. In some embodiments, the subject has or has been diagnosed with a disease or disorder. In some embodiments, the disease or disorder is cystic fibrosis, phenylketonuria, epidermolytic hyperkeratosis (EHK), Charcot-Marie-Toot disease type 4J, neuroblastoma (NB), von Willebrand disease (vWD), myotonia congenital, hereditary renal amyloidosis, dilated cardiomyopathy (DCM), hereditary lymphedema, familial Alzheimer's disease, HIV, Prion disease, chronic infantile neurologic cutaneous articular syndrome (CINCA), desmin-related myopathy (DRM), a neoplastic disease associated with a mutant PI3KCA protein, a mutant CTNNB 1 protein, a mutant HRAS protein, or a mutant p53 protein.

[0265] Some embodiments provide methods for using the Cas9 DNA editing fusion proteins provided herein. In some embodiments, the fusion protein is used to introduce a point mutation into a nucleic acid by deaminating a target nucleobase, e.g., a C residue. In some embodiments, the deamination of the target nucleobase results in the correction of a genetic defect, e.g., in the correction of a point mutation that leads to a loss of function in a gene product. In some embodiments, the genetic defect is associated with a disease or disorder, e.g., a lysosomal storage disorder or a metabolic disease, such as, for example, type I diabetes. In some embodiments, the methods provided herein are used to introduce a deactivating point mutation into a gene or allele that encodes a gene product that is associated with a disease or disorder. For example, in some embodiments, methods are provided herein that employ a Cas9 DNA editing fusion protein to introduce a deactivating point mutation into an oncogene (e.g., in the treatment of a proliferative disease). A deactivating mutation may, in some embodiments, generate a premature stop codon in a coding sequence, which results in the expression of a truncated gene product, e.g., a truncated protein lacking the function of the full-length protein.

[0266] In some embodiments, the purpose of the methods provide herein is to restore the function of a dysfunctional gene via genome editing. The Cas9 deaminase fusion proteins provided herein can be validated for gene editing-based human therapeutics in vitro, e.g., by correcting a disease-associated mutation in human cell culture. It will be understood by the skilled artisan that the fusion proteins provided herein, e.g., the fusion proteins comprising a Cas9 domain and a nucleic acid deaminase domain can be used to correct any single point T->C or A->G mutation. In the first case, deamination of the mutant C back to U corrects the mutation, and in the latter case, deamination of the C that is base-paired with the mutant G, followed by a round of replication, corrects the mutation.

[0267] An exemplary disease-relevant mutation that can be corrected by the provided fusion proteins in vitro or in vivo is the H1047R (A3140G) polymorphism in the PI3KCA protein. The phosphoinositide-3-kinase, catalytic alpha subunit (PI3KCA) protein acts to phosphorylate the 3-OH group of the inositol ring of phosphatidylinositol. The PI3KCA gene has been found to be mutated in many different carcinomas, and thus it is considered to be a potent oncogene.⁵⁰ In fact, the A3140G mutation is present in several NCI-60 cancer cell lines, such as, for example, the HCT116, SKOV3, and T47D cell lines, which are readily available from the American Type Culture Collection (ATCC).⁵¹

[0268] In some embodiments, a cell carrying a mutation to be corrected, e.g., a cell carrying a point mutation, e.g., an A3140G point mutation in exon 20 of the PI3KCA gene, resulting in a H1047R substitution in the PI3KCA protein, is contacted with an expression construct encoding a Cas9 deaminase fusion protein and an appropriately designed sgRNA targeting the fusion protein to the respective mutation site in the encoding PI3KCA gene. Control experiments can be performed where the sgRNAs are designed to target the fusion enzymes to non-C residues that are within the PI3KCA gene. Genomic DNA of the treated cells can be extracted, and the relevant sequence of the PI3KCA genes PCR amplified and sequenced to assess the activities of the fusion proteins in human cell culture.

[0269] It will be understood that the example of correcting point mutations in PI3KCA is provided for illustration purposes and is not meant to limit the instant disclosure. The skilled artisan will understand that the instantly disclosed DNA-editing fusion proteins can be used to correct other point mutations and mutations associated with other cancers and with diseases other than cancer including other proliferative diseases.

[0270] The successful correction of point mutations in disease-associated genes and alleles opens up new strategies for gene correction with applications in therapeutics and basic research. Site-specific single-base modification systems like the disclosed fusions of Cas9 and deaminase enzymes or domains also have applications in “reverse” gene therapy, where certain gene functions are purposely suppressed or abolished. In these cases, site-specifically mutating Trp (TGG), Gln (CAA and CAG), or Arg (CGA) residues to premature stop codons (TAA, TAG, TGA) can be used to abolish protein function in vitro, ex vivo, or in vivo.

[0271] The instant disclosure provides methods for the treatment of a subject diagnosed with a disease associated with or caused by a point mutation that can be corrected by a Cas9 DNA editing fusion protein provided herein. For example, in some embodiments, a method is provided that comprises administering to a subject having such a disease, e.g., a cancer associated with a PI3KCA point mutation as described above, an effective amount of a Cas9 deaminase fusion protein that corrects the point mutation or introduces a deactivating mutation into the disease-associated gene. In some embodiments, the disease is a proliferative disease. In some embodiments, the disease is a genetic disease. In some embodiments, the disease is a neoplastic disease. In some embodiments, the disease is a metabolic disease. In some embodiments, the disease is a lysosomal storage disease. Other diseases that can be treated by correcting a point mutation or introducing a deactivating mutation into a disease-associated gene will be known to those of skill in the art, and the disclosure is not limited in this respect.

[0272] The instant disclosure provides methods for the treatment of additional diseases or disorders, e.g., diseases or disorders that are associated or caused by a point mutation that can be corrected by deaminase-mediated gene editing. Some such diseases are described herein, and additional suitable diseases that can be treated with the strategies and fusion proteins provided herein will be apparent to those of skill in the art based on the instant disclosure. Exemplary suitable diseases and disorders are listed below. It will be understood that the numbering of the specific positions or residues in the respective sequences depends on the particular protein and numbering scheme used. Numbering might be different, e.g., in precursors of a mature protein and the mature protein itself, and differences in sequences from species to species may affect numbering. One of skill in the art will be able to identify the respective residue in any homologous protein and in the respective encoding nucleic acid by methods well known in the art, e.g., by sequence alignment and determination of homologous residues. Exemplary suitable diseases and disorders include, without limitation, cystic fibrosis (see, e.g., Schwank et al., Functional repair of CFTR by CRISPR/Cas9 in intestinal stem cell organoids of cystic fibrosis patients. Cellstem cell. 2013; 13: 653-658; and Wu et. al., Correction of a genetic disease in mouse via use of CRISPR-Cas9. Cellstem cell. 2013; 13: 659-662, neither of which uses a deaminase fusion protein to correct the genetic defect); phenylketonuria—e.g., phenylalanine to serine mutation at position 835 (mouse) or 240 (human) or a homologous residue in phenylalanine hydroxylase gene (T>C mutation)—see, e.g., McDonald et al., Genomics. 1997; 39:402-405; Bernard-Soulier syndrome (BSS)—e.g., phenylalanine to serine mutation at position 55 or a homologous residue, or cysteine to arginine at residue 24 or a homologous residue in the platelet membrane glycoprotein IX (T>C mutation)—see, e.g., Noris et al., British Journal of Haematology. 1997; 97: 312-320, and Ali et al., Hematol. 2014; 93: 381-384; epidermolytic hyperkeratosis (EHK)—e.g., leucine to proline mutation at position 160 or 161 (if counting the initiator methionine) or a homologous residue in keratin 1 (T>C mutation)—see, e.g., Chipev et al., Cell. 1992; 70: 821-828, see also accession number P04264 in the UNIPROT database at www[dot]uniprot[dot]org; chronic obstructive pulmonary disease (COPD)—e.g., leucine to proline mutation at position 54 or 55 (if counting the initiator methionine) or a homologous residue in the processed form of α₁-antitrypsin or residue 78 in the unprocessed form or a homologous residue (T>C mutation)—see, e.g., Poller et al., Genomics. 1993; 17: 740-743, see also accession number P01011 in the UNIPROT database; Charcot-Marie-Toot disease type 4J—e.g., isoleucine to threonine mutation at position 41 or a homologous residue in FIG. 4 (T>C mutation)—see, e.g., Lenk et al., PLoS Genetics. 2011; 7: e1002104; neuroblastoma (NB)—e.g., leucine to proline mutation at position 197 or a homologous residue in Caspase-9 (T>C mutation)—see, e.g., Kundu et al., 3 Biotech. 2013, 3:225-234; von Willebrand disease (vWD)—e.g., cysteine to arginine mutation at position 509 or a homologous residue in the processed form of von Willebrand factor, or at position 1272 or a homologous residue in the unprocessed form of von Willebrand factor (T>C mutation)—see, e.g., Lavergne et al., Br. J. Haematol. 1992, see also accession number P04275 in the UNIPROT database; 82: 66-72; myotonia congenital—e.g., cysteine to arginine mutation at position 277 or a homologous residue in the muscle chloride channel gene CLCN1 (T>C mutation)—see, e.g., Weinberger et al., The J. of Physiology. 2012; 590: 3449-3464; hereditary renal amyloidosis—e.g., stop codon to arginine mutation at position 78 or a homologous residue in the processed form of apolipoprotein AII or at position 101 or a homologous residue in the unprocessed form (T>C mutation)—see, e.g., Yazaki et al., Kidney Int. 2003; 64: 11-16; dilated cardiomyopathy (DCM)—e.g., tryptophan to Arginine mutation at position 148 or a homologous residue in the FOXD4 gene (T>C mutation), see, e.g., Minoretti et. al., Int. J. of Mol. Med. 2007; 19: 369-372; hereditary lymphedema—e.g., histidine to arginine mutation at position 1035 or a homologous residue in VEGFR3 tyrosine kinase (A>G mutation), see, e.g., Irrthum et al., Am. J. Hum. Genet. 2000; 67: 295-301; familial Alzheimer's disease—e.g., isoleucine to valine mutation at position 143 or a homologous residue in presenilin1 (A>G mutation), see, e.g., Gallo et. al., J Alzheimer's disease. 2011; 25: 425-431; Prion disease—e.g., methionine to valine mutation at position 129 or a homologous residue in prion protein (A>G mutation)—see, e.g., Lewis et. al., J. of General Virology. 2006; 87: 2443-2449; chronic infantile neurologic cutaneous articular syndrome (CINCA)—e.g., Tyrosine to Cysteine mutation at position 570 or a homologous residue in cryopyrin (A>G mutation)—see, e.g., Fujisawa et. al. Blood. 2007; 109: 2903-2911; and desmin-related myopathy (DRM)—e.g., arginine to glycine mutation at position 120 or a homologous residue in cB crystallin (A>G mutation)—see, e.g., Kumar et al., J. Biol. Chem. 1999; 274: 24137-24141. The entire contents of all references and database entries is incorporated herein by reference.

[0273] The instant disclosure provides lists of genes comprising pathogenic T>C or A>G mutations, which may be corrected using any of the Cas9 fusion proteins provided herein. Provided herein, are the names of these genes, their respective SEQ ID NOs, their gene IDs, and sequences flanking the mutation site. See Tables 4 and 5. Without wishing to be bound by any particular theory, the mutations provided in Tables 4 and 5 may be corrected using the Cas9 fusions provided herein, which are able to bind to target sequences lacking the canonical PAM sequence. In some embodiments, a Cas9-deaminase fusion protein demonstrates activity on non-canonical PAMs and therefore can correct all the pathogenic T>C or A>G mutations listed in Tables 4 and 5 (SEQ ID NOs: 674-2539 and 3144-5083), respectively. In some embodiments, a Cas9-deaminase fusion protein recognizes canonical PAMs and therefore can correct the pathogenic T>C or A>G mutations with canonical PAMs, e.g., 5′-NGG-3′. It should be appreciated that a skilled artisan would understand how to design an RNA (e.g., a gRNA) to target any of the Cas9 proteins or fusion proteins provided herein to any target sequence in order to correct any of the mutations provided herein, for example, the mutations provided in Tables 4 and 5. It will be apparent to those of skill in the art that in order to target a Cas9:effector domain fusion protein as disclosed herein to a target site, e.g., a site comprising a point mutation to be edited, it is typically necessary to co-express the Cas9:effector domain fusion protein together with a guide RNA, e.g., an sgRNA. As explained in more detail elsewhere herein, a guide RNA typically comprises a tracrRNA framework allowing for Cas9 binding, and a guide sequence, which confers sequence specificity to the Cas9:effector domain fusion protein. In some embodiments, the guide RNA comprises a structure 5′-[guide sequence]-guuuuagagcuagaaauagcaaguuaaaauaaaggcuaguccguuaucaacuugaaaaaguggcaccgagucggugcuu uuu-3′ (SEQ ID NO: 285),

wherein the guide sequence comprises a sequence that is complementary to the target sequence. The guide sequence is typically 20 nucleotides long. The sequences of suitable guide RNAs for targeting Cas9:effector domain fusion proteins to specific genomic target sites will be apparent to those of skill in the art based on the instant disclosure. Such suitable guide RNA sequences typically comprise guide sequences that are complementary to a nucleic sequence within 50 nucleotides upstream or downstream of the target nucleotide to be edited.

### Kits, Vectors, Cells

[0274] Some aspects of this disclosure provide kits comprising a nucleic acid construct, comprising (a) a nucleotide sequence encoding a Cas9 protein or a Cas9 fusion protein as provided herein; and (b) a heterologous promoter that drives expression of the sequence of (a). In some embodiments, the kit further comprises an expression construct encoding a guide RNA backbone, wherein the construct comprises a cloning site positioned to allow the cloning of a nucleic acid sequence identical or complementary to a target sequence into the guide RNA backbone.

[0275] Some aspects of this disclosure provide polynucleotides encoding a Cas9 protein of a fusion protein as provided herein. Some aspects of this disclosure provide vectors comprising such polynucleotides. In some embodiments, the vector comprises a heterologous promoter driving expression of polynucleotide.

[0276] Some aspects of this disclosure provide cells comprising a Cas9 protein, a fusion protein, a nucleic acid molecule, and/or a vector as provided herein.

[0277] The description of exemplary embodiments of the reporter systems herein is provided for illustration purposes only and not meant to be limiting. Additional reporter systems, e.g., variations of the exemplary systems described in detail above, are also embraced by this disclosure.

### EXAMPLES

### Example 1: PACE Evolution of a Cas9 without PAM Sequence Restriction

[0278] Building PAM Libraries.

[0279] Four different protospacer target sequences were synthesized: Doench 1-5′-AAGAGAGACAGTACATGCCC-3′(SEQ ID NO: 286);

[0280] Doench 2-5′-GGAGCCCACCGAGTACCTGG-3′(SEQ ID NO: 287); G7′-5′-AGTCTCCTCAGCAAAACGAA-3′(SEQ ID NO: 288); and VEGF Target 2-5′-GACCCCCTCCACCCCGCCTC-3′ (SEQ ID NO: 289). For each protospacer target sequence, a 3′-NNN PAM library was built. While the canonical PAM sequence is 5′-NGG-3′, (e.g., an exemplary [Doench 1]-[canonical PAM] target sequence could be 5′-[AAGAGAGACAGTACATGCCC]-[NGG]-3′ (SEQ ID NO: 291)), the 3 NNN PAM libraries for each protospacer target sequence contained a fully random PAM sequence, e.g., for Doenchl 5′-AAGAGAGACAGTACATGCCCNNN-3′ (SEQ ID NO: 290), wherein N represents any nucleotide. The NNN PAM libraries thus included every possible combination of PAM sequences at the 3′ end of the respective protospacer target sequence.

[0281] Testing the Activity of Cas9 on PAM Libraries in a Co-dCas9 Luciferase Assay.

[0282] Cas9 activity was tested using a bacterial luciferase activation assay in which a fusion protein of the co subunit of Escherichia coli RNA polymerase (rpoZ) to dCas9 (see, e.g., Bikard et al., Nucleic Acids Res. 2013 August; 41(15): 7429-7437) drives the production of luciferase encoded by a nucleic acid under the control of a weak promoter comprising a sequence targeted by an sgRNA. Each PAM library was cloned into a plasmid comprising such a weak promoter, where the [target sequence]-[PAM library] nucleic acid sequences served as the sequence targeted by an sgRNA. A PAM library was cloned into the promoter for The ω-dCas9 assay was run on all four protospacer targets for both the canonical PAM and the random PAM library. FIG. 1 shows the activity of wild-type S. pyogenes Cas9 on PAM Libraries.

[0283] Evolution of Cas9 on PAM Libraries.

[0284] S. pyogenes dCas9 was fused to the co unit of RNA polymerase. The resulting ω-dCas9 fusion protein was cloned into an M13 phage-based selection phagemid (SP), comprising the entire M13 phage genome except for a functional version of the gene encoding pIII, a gene essential for the generation of infectious phage particles. The phage gene encoding pIII was provided on a separate plasmid (accessory plasmid, AP), under the control of a promoter that is transcriptionally activated by ω-dCas9. The PAM library was cloned into the promoter region of the accessory plasmid. Host cells used for the directed evolution of Cas9 proteins without PAM restriction were provided that harbored the accessory plasmid. Upon infection with a selection phage, the amount of infectious phage particles produced by a given host cell thus depends on the activity of the ω-dCas9 fusion protein encoded by the selection phage on the promoter of the accessory plasmid, which is required for the production of pIII protein. The accessory plasmid thus confers a selective advantage to those selection phages encoding ω-dCas9 fusion protein variants with an increased activity on different non-canonical PAM sequences.

[0285] A lagoon was provided and a flow of host cells comprising the accessory plasmid was generated through the lagoon. The host cells were contacted with the selection phagemid, resulting in a population of selection phage propagating in the flow of host cells in the lagoon. Phage-infected host cells were removed from the lagoon and fresh, uninfected host cells were fed into the lagoon at a rate resulting in the average time a host cell remained in the lagoon being shorter than the average time between cell division of the host cells, but longer than the average M13 phage life cycle time.

[0286] In order to generate Cas9 variants during a directed evolution experiment, the host cells in the lagoon were incubated under conditions resulting in an increased mutation rate. The host cells were harboring a mutagenesis plasmid (MP), which increased the mutagenesis rate, thus introducing mutations in the ω-dCas9 fusion protein encoded by the selection phagemid during the phage life cycle. Because the flow rate of host cells through the lagoon results in the average time a host cell remains in the lagoon being shorter than the average time between host cell divisions, the host cells in the lagoon cannot accumulate mutations resulting from the increased mutation rate conferred by the mutagenesis plasmid in their genome or on the accessory plasmid. The selection phage, however, replicate in the lagoon in the flow of host cells and thus accumulate mutations over time, resulting in the generation of new, evolved ω-dCas9 fusion protein variants.

[0287] If any of these evolved ω-dCas9 fusion protein variants includes a mutation that confers an increased activity on the accessory plasmid comprising the PAM library, this will directly translate into the generation of more pIII by a host cell infected with a selection phage encoding the respective ω-dCas9 fusion protein variant. The production of more pIII will, in turn, result in the generation of more infectious selection phage particles, which, over time, results in a competitive advantage of the mutant selection phage harboring such beneficial mutations over selection phage not harboring such mutations. After a period of time, the selective pressure exerted by the accessory plasmid will, therefore, result in selection phage having acquired beneficial mutations being the predominant species replicating in the flow of host cells, while selection phage with no mutations or with detrimental mutations will be washed out of the lagoon.

[0288] Because the ω-dCas9 fusion protein activity on the PAM library was very low at the beginning of the experiment, multiple rounds of overnight propagation of the selection phagemid in host cells harboring an accessory plasmid containing the PAM library were carried out to evolve Cas9 variants that show increased activity on noncanonical PAM sequences. At the end of a directed evolution experiment, the evolved population of selection phage was isolated from the lagoon, and a representative number of clones was analyzed to detect Cas9 variants having beneficial mutations. While all mutations observed confer a beneficial phenotype, mutations shared by more than one clone, or by all clones, are of particular interest.

[0289] Mutations from Cas9 PACE.

[0290] A number of selection phage clones was isolated from a directed evolution experiment using a PAM library accessory plasmid as described above. The mutations identified in the Cas9 amino acid sequence of some exemplary clones is provided below in Table 1 (residue numbering according to SEQ ID NO: 9):

TABLE 1

| Clone | Mutations | | | | |
|---|---|---|---|---|---|
| 1 | | | D182 | | E1219V |
| 2 | | H137 | D182 | | E1219V |
| 3 | | | D182 | G660 | E1219V |
| 4 | I122 | | D182 | | E1219V |

Cas9 mutations identified in PACE (residue numbering according to SEQ ID NO: 9.

[0291] Clones 1-4 were tested in the ω-dCas9 luciferase activation assay described above. When tested on the PAM library as a whole, the different clones showed an improvement in luciferase expression (FIG. 2—Cas9 activity of exemplary evolved clones on PAM library after directed evolution).

[0292] Improvement of Cas9 Activity on Non-Canonical PAM Sequences.

[0293] The activity of evolved Cas9 proteins on target sequences with noncanonical PAMs was evaluated in more detail. The relative activity of Clone 4, harboring 1122, D182, and E1219V mutations, for various [Doench 2 (5′-GGAGCCCACCGAGTACCTGG-3′ (SEQ ID NO: 287))]-[PAM] target sequences was tested in the ω-dCas9 luciferase activation assay and compared to the activity of wild-type dCas9.

[0294] Improvement of Cas9 Activity on Non-Canonical PAM Sequences.

[0295] The activity of evolved Cas9 proteins on target sequences with noncanonical PAMs was evaluated in more detail. The relative activity of Clone 4, harboring 1122, D182, and E1219V mutations, for various [Doench 2 (5′-GGAGCCCACCGAGTACCTGG-3′(SEQ ID NO: 287))]-[PAM] target sequences was tested in the ω-dCas9 luciferase activation assay and compared to the activity of wild-type dCas9. The data are shown in Table 2.

TABLE 2

| | Clone 4 dCas9 | Wild-type dCas9 |
|---|---|---|
| PAM | Luciferase Activity | Luciferase Activity |
| GTC | 44.84 | 4.07 |
| AGC | 25.01 | 4.42 |
| GAG | 186.22 | 73.60 |
| TTT | 36.49 | 3.96 |
| GTG | 119.53 | 6.86 |
| AGG | 238.29 | 244.27 |
| CAA | 13.90 | 5.28 |

Relative activity of clone 4 on various PAM sequences.

### Example 2: PA CE Evolution of a Cas9 without any PAM Sequence Restriction

[0296] Because the activity of the ω-dCas9 fusion protein on the NNN-PAM libraries was very low, a second round of PACE experiments was performed, in which an initial phase of diversification of the ω-dCas9 fusion protein population was carried out in the absence of selective pressure by providing a source of pIII that did not depend on ω-dCas9 fusion protein activity. The initial diversification stage allows mutations to develop that may not be accessible in a PACE experiment where selective pressure is applied throughout the experiment.

[0297] Selection phage harboring a ω-dCas9 fusion protein with a dCas9 sequence provided as SEQ ID NO: 8 with D10A and H840A mutations was propagated overnight in 1030 host cells together with MP6 mutagenesis plasmid in the presence of arabinose in order to create a library of mutated selection phage encoding a library of ω-dCas9 fusion protein variants. PIII was expressed from a separate plasmid in the host cells during this initial diversification stage. After overnight (12 h) diversification, 1030 host cells harboring an accessory plasmid comprising an NNN PAM library cloned into a weak promoter as the guide RNA target sequence and a mutagenesis plasmid were grown to log phase, and used as the source of host cells to create a flow of host cells through a lagoon. The cells in the lagoon were infected with the diversified selection phage from the overnight incubation. The host cells in the lagoon were contacted with arabinose in order to maintain a high level of expression of the mutagenic genes from the mutagenesis plasmid.

[0298] The initial phage titers were about 10⁸ pfu/mL. A PACE experiment was performed for each of the four NNN-PAM libraries ([Doench 1]-[NNN-PAM], [Doench 2]-[NNN-PAM], [G7]-[NNN-PAM], and [VEGF target]-[NNN-PAM] cloned into an accessory plasmid driving pIII expression from a weak promoter as described above. The phage titers were monitored during the PACE experiments. A slow drop in phage titers to 10⁴ pfu/mL was observed. The phage population was isolated from the lagoon at that point, and grown on 2208 host cells containing a separate source of pIII (psp-driven pIII). After this low-stringency propagation period, a 1:100 dilution of the supernatant was added to fresh host cells harboring the accessory plasmid as the only source of pIII in a new lagoon, and the PACE experiments were continued. No drop in phage titers was observed after this low-stringency incubation in 2208 cells.

[0299] One exemplary PACE experiment that was run for 72 hours. After that period of time, 24 surviving clones were isolated from the lagoon, sequenced, and characterized. The mutations identified included A262T, K294R, S409I, M694I, E480K, E543D, and E1219V (amino acid numbering according to SEQ ID NO: 9). In another exemplary experiment, surviving clones were isolated after 15 days of incubation. Activity of the identified dVas9 mutants was characterized in a ω-dCas9 luciferase assay. Clones with the best ω-dCas9 fusion protein activity on noncanonical PAM target sequences had the following mutations: E480K, E543D, E1219V, and T1329.

[0300] Cas9 Mammalian GFP Activation.

[0301] Both wild-type dCas9 (SEQ ID NO: 9) and the evolved Cas9 clones were tested in a dCas9-GFP assay in Hek293T cells. The cells were contacted with a reporter construct in which a GFP-encoding sequence was driven from a weak promoter that includes a [gRNA target sequence]-[PAM] sequence. Fusion proteins of dCas9 (wild-type and PACE variants) attached to the transcriptional activator VP64-p65-Rta (VPR) were generated, and the various dCas9-VPR variants were tested for their capacity to activate the GFP reporter in HEK293 cells.

[0302] Hek293T were transfected with four separate plasmids: a dCas9-VPR expression plasmid; a plasmid expressing the sgRNA targeting the gRNA target sequence of the GFP reporter plasmid; the GFP reporter plasmid; and an iRFP transfection control. In one experiment, the HEK293 cells were contacted with a GFP reporter included a TAA PAM, and in another experiment, the HEK293 cells were contacted with a population of reporter plasmids containing an NNN PAM library. Cells were harvested 48 hours after transfection and GFP expressing cells were quantified using a BD LSR-FORTESSA cell analyzer.

[0303] FIG. 3—Cas9 Mammalian GFP Activation. Compared with WT Cas9, the evolved Cas9s showed much higher activity on both the TAA PAM (21.08% vs. 0.60% of cells above negative control) and a library of NNN PAM (22.76% vs. 3.38% of cells above negative control).

[0304] Evolved Cas9 Cutting Activity on Target Sequences with Noncanonical PAM.

[0305] In order to demonstrate that the PACE mutations universally confer Cas9 activity without PAM restriction, nuclease-active Cas9 proteins were generated based on the sequence provided in, i.e., without the D10A and H840A mutations, but harboring the various PACE mutations. The evolved Cas9 variants were tested in a Cas9 GFP assay, assessing the capacity of the evolved Cas9 protein variants to target and inactivate an emGFP gene integrated into the genome of HEK293 cells using a guide RNA targeting a sequence with a noncanonical PAM. It was observed that 6.45% of cells showed loss of GFP expression when contacted with a wild-type nuclease-active Cas9 (SEQ ID NO: 9), while 54.55% of cells contacted with the evolved Cas9 (E480K, E543D, E1219V, and T1329) showed a loss of GFP expression.

### Example 3: Cas9 Variants without PAM Restrictions

[0306] The beneficial mutations conferring Cas9 activity on noncanonical PAM sequences were mapped to a S. pyogenes wild-type sequence. Below is an exemplary Cas9 sequence (S. pyogenes Cas9 with D10 and H840 residues marked with an asterisk following the respective amino acid residues, SEQ ID NO: 9). The D10 and H840 residues of SEQ ID NO: 9 may be mutated to generate a nuclease inactive Cas9 (e.g., to D10A and H840A) or to generate a nickase Cas9 (e.g., to D10A with H840; or to D10 with H840A). The HNH domain (bold and underlined) and the RuvC domain (boxed) are identified. The residues found mutated in the clones isolated from the various PACE experiments, amino acid residues 122, 137, 182, 262, 294, 409, 480, 543, 660, 694, 1219, and 1329 are identified with an asterisk following the respective amino acid residue.

(SEQ ID NO: 9)
MDKKYSIGLD*IGTNSVGWAVITDEYKVPSKKFKVLGNTDRHSIKKNLIGALLFDSGETAEATRLKRTARRRYTR
RKNRICYLQEIFSNEMAKVDDSFFHRLEESFLVEEDKKHERHPIFGNI*VDEVAYHEKYPTIYH*LRKKLVDSTD
KADLRLIYLALAHMIKFRGHFLIEGDLNPDNSDVD*KLFIQLVQTYNQLFEENPINASGVDAKAILSARLSKSRR
LENLIAQLPGEKKNGLFGNLIALSLGLTPNFKSNFDLAEDA*KLQLSKDTYDDDLDNLLAQIGDQYADLFLAAK*
NLSDAILLSDILRVNTEITKAPLSASMIKRYDEHHQDLTLLKALVRQQLPEKYKEIFFDQSKNGYAGYIDGGASQ
EEFYKFIKPILEKMDGTEELLVKLNREDLLRKQRTEDNGS*IPHQIHLGELHAILRRQEDFYPFLKDNREKIEKI
LTFRIPYYVGPLARGNSRFAWMTRKSEETITPWNFEE*VVDKGASAQSFIERMTNFDKNLPNEKVLPKHSLLYEY
FTVYNELTKVKYVTEGMRKPAFLSGE*QKKAIVDLLFKTNRKVTVKQLKEDYFKKIECEDSVEISGVEDRFNASL
GTYHDLLKIIKDKDFLDNEENEDILEDIVLTLTLFEDREMIEERLKTYAHLFDDKVMKQLKRRRYTGWG*RLSRK

[chemical structure]

[chemical structure]

YLQNGRDMYVDQELDINRLSDYDVDH*IVPQSFLKDDSIDNKVLTRSDKNRGKSDNVPSEEVVKKMKNYWRQLLN

[chemical structure]

[chemical structure]

[chemical structure]

RNSDKLIARKKDWDPKKYGGFDSPTVAYSVLVVAKVEKGKSKKLKSVKELLGITIMERSSFEKNPIDFLEAKGYK
EVKKDLIIKLPKYSLFELENGRKRMLASAGE*LQKGNELALPSKYVNFLYLASHYEKLKGSPEDNEQKQLFVEQH
KHYLDEIIEQISEFSKRVILADANLDKVLSAYNKHRDKPIREQAENIIHLFTLTNLGAPAAFKYFDT*TIDRKRY
TSTKEVLDATLIHQSITGLYETRIDLSQLGGD

[0307] The beneficial mutations conferring Cas9 activity on noncanonical PAM sequences were mapped to additional exemplary wild-type Cas9 sequences. The HNH domain (bold and underlined) and the RuvC domain (boxed) are identified. The residues homologous to the residues found mutated in SEQ ID NO: 9, amino acid residues 122, 137, 182, 262, 294, 409, 480, 543, 660, 694, 1219, and 1329 are identified with an asterisk following the respective amino acid residue. In addition, amino acid residues 10 and 840, which are mutated in dCas9 protein variants, are also identified by an asterisk.

(SEQ ID NO: 297)
MDKKYSIGLD*IGTNSVGWAVITDDYKVPSKKFKVLGNTDRHSIKKNLIGALLFGSGETAEATRLKRTARRRYTR
RKNRICYLQEIFSNEMAKVDDSFEHRLEESFLVEEDKKHERHPIEGNI*VDEVAYHEKYPTIYH*LRKKLADSTD
KADLRLIYLALAHMIKFRGHFLIEGDLNPDNSDVD*KLFIQLVQIYNQLFEENPINASRVDAKAILSARLSKSRR
LENLIAQLPGEKRNGLEGNLIALSLGLIPNFKSNFDLAEDA*KLQLSKDTYDDDLDNLLAQIGDQYADLFLAAK*
NLSDAILLSDILRVNSEITKAPLSASMIKRYDEHHQDLTLLKALVRQQLPEKYKEIFFDQSKNGYAGYIDGGASQ
EEFYKFIKPILEKMDGTEELLVKLNREDLLRKQRTFDNGS*IPHQIHLGELHAILRRQEDFYPFLKDNREKIEKI
LTFRIPYYVGPLARGNSRFAWMTRKSEETITPWNFEE*VVDKGASAQSFIERMTNFDKNLPNEKVLPKHSLLYEY
FTVYNELTKVKYVTEGMRKPAFLSGE*QKKAIVDLLFKTNRKVTVKQLKEDYFKKIECEDSVEISGVEDRFNASL
GAYHDLLKIIKDKDFLDNEENEDILEDIVLTLTLFEDRGMIEERLKTYAHLFDDKVMKQLKRRRYTGWG*RLSRK

[chemical structure]

[chemical structure]

LQNGRDMYVDQELDINRLSDYDVDH*IVPQSFIKDDSIDNKVLTRSDKNRGKSDNVPSEEVVKKMKNYWRQLLNA

[chemical structure]

[chemical structure]

[chemical structure]

NSDKLIARKKDWDPKKYGGFDSPIVAYSVLVVAKVEKGKSKKLKSVKELLGITIMERSSFEKNPIDFLEAKGYKE
VKKDLIIKLPKYSLFELENGRKRMLASAGE*LQKGNELALPSKYVNFLYLASHYEKLKGSPEDNEQKQLFVEQHK
HYLDEIIEQISEFSKRVILADANLDKVLSAYNKHRDKPIREQAENIIHLFTLINLGAPAAFKYFDT*TIDRKRYT
STKEVLDATLIHQSITGLYETRIDLSQLGGD
(SEQ ID NO: 298)
MDKKYSIGLA*IGTNSVGWAVITDEYKVPSKKFKVLGNTDRHSIKKNLIGALLFDSGETAEATRLKRTARRRYTR
RKNRICYLQEIFSNEMAKVDDSFFHRLEESELVEEDKKHERHPIFGNI*VDEVAYHEKYPTIYH*LRKKLVDSTD
KADLRLIYLALAHMIKFRGHFLIEGDLNPDNSDVD*KLFIQLVQTYNQLFEENPINASGVDAKAILSARLSKSRR
LENLIAQLPGEKKNGLFGNLIALSLGLIPNFKSNFDLAEDA*KLQLSKDTYDDDLDNLLAQIGDQYADLFLAAK*
NLSDAILLSDILRVNTEITKAPLSASMIKRYDEHHQDLTLLKALVRQQLPEKYKEIFFDQSKNGYAGYIDGGASQ
EEFYKFIKPILEKMDGTEELLVKLNREDLLRKQRTEDNGS*IPHQIHLGELHAILRRQEDFYPFLKDNREKIEKI
LTFRIPYYVGPLARGNSRFAWMTRKSEETITPWNFEE*VVDKGASAQSFIERMTNFDKNLPNEKVLPKHSLLYEY
FTVYNELTKVKYVTEGMRKPAFLSGE*QKKAIVDLLFKTNRKVTVKQLKEDYFKKIECFDSVEISGVEDRFNASL
GTYHDLLKIIKDKDFLDNEENEDILEDIVLILTLFEDREMIEERLKTYAHLFDDKVMKQLKRRRYTGWG*RLSRK

[chemical structure]

[chemical structure]

YLQNGRDMYVDQELDINRLSDYDVDH*IVPQSFLKDDSIDNKVLTRSDKNRGKSDNVPSEEVVKKMKNYWRQLLN

[chemical structure]

[chemical structure]

[chemical structure]

RNSDKLIARKKDWDPKKYGGFDSPTVAYSVLVVAKVEKGKSKKLKSVKELLGITIMERSSFEKNPIDFLEAKGYK
EVKKDLIIKLPKYSLFELENGRKRMLASAGE*LQKGNELALPSKYVNFLYLASHYEKLKGSPEDNEQKQLFVEQH
KHYLDEIIEQISEFSKRVILADANLDKVLSAYNKHRDKPIREQAENIIHLFTLINLGAPAAFKYFDT*TIDRKRY
TSTKEVLDATLIHQSITGLYETRIDLSQLGGD
>gi|504540549|ref|WP_014727651.1| type II CRISPR RNA-guided endonuclease
Cas9 [Streptococcus thermophilus]
(SEQ ID NO: 260)
MTKPYSIGLD*IGTNSVGWAVITDNYKVPSKKMKVLGNTSKKYIKKNLLGVLLFDSGITAEGRRLKRTARRRYTR
RRNRILYLQEIFSTEMATLDDAFFQRLDDSFLVPDDKRDSKYPIFGNL*VEEKAYHDEEPTIYH*LRKYLADSTK
KADLRLVYLALAHMIKYRGHFLIEGEFNSKNNDIQ*KNFQDFLDTYNAIFESDLSLENSKQLEEIVKDKISKLEK
KDRILKLFPGEKNSGIFSEFLKLIVGNQADFRKCFNLDEKA*SLHFSKESYDEDLETLLGYIGDDYSDVFLKAK*
KLYDAILLSGFLTVTDNETEAPLSSAMIKRYNEHKEDLALLKEYIRNISLKTYNEVFKDDTKNGYAGYIDGKTNQ
EDFYVYLKNLLAEFEGADYFLEKIDREDFLRKQRTEDNGS*IPYQIHLQEMRAILDKQAKFYPFLAKNKERIEKI
LTFRIPYYVGPLARGNSDFAWSIRKRNEKITPWNFED*VIDKESSAEAFINRMTSFDLYLPEEKVLPKHSLLYET
FNVYNELTKVRFIAESMRDYQFLDSK*QKKDIVRLYFKDKRKVTDKDIIEYLHAIYGYDGIELKGIEKQFNSSLS
TYHDLLNIINDKEFLDDSSNEAIIEEIIHTLTIFEDREMIKQRLSKFENIFDKSVLKKLSRRHYTGWG*KLSAKL

[chemical structure]

[chemical structure]

NDRLYLYYLQNGKDMYTGDDLDIDRLSNYDIDH*IIPQAFLKDNSIDNKVLVSSASNRGKSDDFPSLEVVKKRKT

[chemical structure]

[chemical structure]

[chemical structure]

FNANLSSKPKPNSNENLVGAKEYLDPKKYGGYAGISNSFAVLVKGTIEKGAKKKITNVLEFQGISILDRINYRKD
KLNFLLEKGYKDIELIIELPKYSLFELSDGSRRMLASILSTNNKRGE*IHKGNQIFLSQKFVKLLYHAKRISNTI
NENHRKYVENHKKEFEELFYYILEFNENYVGAKKNGKLLNSAFQSWQNHSIDELCSSFIGPTGSERKGLFELTSR
GSAADFEFLGV*KIPRYRDYTPSSLLKDATLIHQSVTGLYETRIDLAKLGEG
>gi 924443546 | Staphylococcus Aureus Cas9
(SEQ ID NO: 261)
GSHMKRNYILGLD*IGITSVGYGIIDYETRDVIDAGVRLFKEANVENNEGRRSKRGARRLKRRRRHRIQRVKKLL
FDYNLLTDHSELSGINP*YEARVKGLSQKLSEEEFSAALLHLAKRRGVHNVNEVEEDTGNELST*KEQISRNSKA
LEEKYVAELQLERLKKDGEVRGSINRFKTSDYVKEAKQLLKVQKAYHQLDQSFIDTYIDLLETRRTYYEGPGEGS
PFGWKDIKEWYEMLMGHCTYFPEELRSVKYAYNADLYNALNDLNNLVITRDENEKLEYY*EKFQIIENVEKQKKK
PTLKQIAKEILVNEEDIKGYRVTSTGKPEFTNLKVYHDIKDITARKEIIENAELLDQIAKILTIYQSSEDIQEEL

[chemical structure]

[chemical structure]

AKYLIEKIKLHDMQEGKCLYSLEAIPLEDLLNNPFNYEVDH*IIPRSVSFDNSFNNKVLVKQEEASKKGNRTPFQ

[chemical structure]

[chemical structure]

[chemical structure]

LKKLINKSPEKLLMYHHDPQTYQKLKLIMEQYGDEKNPLYKYYEETGNYLTKYSKKDNGPVIKKIKYYGNKLNAH
LDITDDYPNS*RNKVVKLSLKPYRFDVYLDNGVYKFVTVKNLDVIKKENYYEVNSKAYEEAKKLKKISNQAEFIA
SFYNNDLIKINGELYRVIGVNNDLLNRIEVNMIDITYREYLEN*MNDKRPPRIIKTIASKTQSIKKYSTDILGNL
YEVKSKKHPQIIKKG

[0308] This disclosure provides Cas9 variants in which one or more of the amino acid residues identified by an asterisk are mutated as described herein. In some embodiments, the D10 and H840 residues are mutated, e.g., to an alanine residue, and the Cas9 variants provided include one or more additional mutations of the amino acid residues identified by an asterisk as provided herein. In some embodiments, the D10 residue is mutated, e.g., to an alanine residue, and the Cas9 variants provided include one or more additional mutations of the amino acid residues identified by an asterisk as provided herein.

[0309] A number of Cas9 sequences from various species were aligned to determine whether corresponding homologous amino acid residues can be identified in other Cas9 proteins, allowing the generation of Cas9 variants with corresponding mutations of the homologous amino acid residues. The alignment was carried out using the NCBI Constraint-based Multiple Alignment Tool (COBALT (accessible at st-va.ncbi.nlm.nih.gov/tools/cobalt), with the following parameters. Alignment parameters: Gap penalties −11, −1; End-Gap penalties −5, −1. CDD Parameters: Use RPS BLAST on; Blast E-value 0.003; Find Conserved columns and Recompute on. Query Clustering Parameters: Use query clusters on; Word Size 4; Max cluster distance 0.8; Alphabet Regular.

[0310] An exemplary alignment of four Cas9 sequences is provided below. The Cas9 sequences in the alignment are: Sequence 1 (S1): SEQ ID NO: 10|WP_010922251|gi 499224711|type II CRISPR RNA-guided endonuclease Cas9 [Streptococcus pyogenes]; Sequence 2 (S2): SEQ ID NO: 11|WP_039695303|gi 746743737|type II CRISPR RNA-guided endonuclease Cas9 [Streptococcus gallolyticus]; Sequence 3 (S3): SEQ ID NO: 12|WP_045635197|gi 782887988|type II CRISPR RNA-guided endonuclease Cas9 [Streptococcus mitis]; Sequence 4 (S4): SEQ ID NO: 13|5AXW_A|gi 924443546|Staphylococcus Aureus Cas9. The HNH domain (bold and underlined) and the RuvC domain (boxed) are identified for each of the four sequences. Amino acid residues 10, 122, 137, 182, 262, 294, 409, 480, 543, 660, 694, 840, 1219, and 1329 in S1 and the homologous amino acids in the aligned sequences are identified with an asterisk following the respective amino acid residue.

| | | | |
|---|---|---|---|
| S1 | 1 | --MDKK-YSIGLD*IGTNSVGWAVITDEYKVPSKKFKVLGNTDRHSIKKNLI--GALLFDSG--ETAEATRLKRTARRRYT | 73 |
| S2 | 1 | --MTKKNYSIGLD*IGTNSVGWAVITDDYKVPAKKMKVLGNTDKKYIKKNLL--GALLFDSG--ETAEATRLKRTARRRYT | 74 |
| S3 | 1 | --M-KKGYSIGLD*IGTNSVGFAVITDDYKVPSKKMKVLGNTDKRFIKKNLI--GALLFDEG--TTAEARRLKRTARRRYT | 73 |
| S4 | 1 | GSHMKRNYILGLD*IGITSVGYGII--DYET-----------------RDVIDAGVRLFKEANVENNEGRRSKRGARRLKR | 61 |
| S1 | 74 | RRKNRICYLQEIFSNEMAKVDDSFFHRLEESELVEEDKKHERHPIFGNI*VDEVAYHEKYPTIYH*LRKKLVDSTDKADLRL | 153 |
| S2 | 75 | RRKNRLRYLQEIFANEIAKVDESFFQRLDESFLTDDDKTFDSHPIFGNK*AEEDAYHQKFPTIYH*LRKHLADSSEKADLRL | 154 |
| S3 | 74 | RRKNRLRYLQEIFSEEMSKVDSSFFHRLDDSFLIPEDKRESKYPIFATL*TEEKEYHKQFPTIYH*LRKQLADSKEKTDLRL | 153 |
| S4 | 62 | RRRHRIQRVKKLL--------------FDYNLLTD---------------------HSELSGINP*YEARVKGLSQKLSEEE | 107 |
| S1 | 154 | IYLALAHMIKFRGHFLIEGDLNPDNSDVD*KLFIQLVQTYNQLFEENPINASGVDAKAILSARLSKSRRLENLIAQLPGEK | 233 |
| S2 | 155 | VYLALAHMIKFRGHFLIEGELNAENTDVQ*KIFADFVGVYNRTFDDSHLSEITVDVASILTEKISKSRRLENLIKYYPTEK | 234 |
| S3 | 154 | IYLALAHMIKYRGHFLYEEAFDIKNNDIQ*KIFNEFISIYDNTFEGSSLSGQNAQVEAIFTDKISKSAKRERVLKLFPDEK | 233 |
| S4 | 108 | FSAALLHLAKRRG-----------------------VHNVNEVEEDT---------------------------------- | 131 |
| S1 | 234 | KNGLFGNLIALSLGLTPNFKSNFDLAEDA*KLQLSKDTYDDDLDNLLAQIGDQYADLFLAAK*NLSDAILLSDILRVNTEIT | 313 |
| S2 | 235 | KNTLFGNLIALALGLQPNFKTNFKLSEDA*KLQFSKDTYEEDLEELLGKIGDDYADLFTSAK*NLYDAILLSGILTVDDNST | 314 |
| S3 | 234 | STGLFSEFLKLIVGNQADFKKHFDLEDKA*PLQFSKDTYDEDLENLLGQIGDDFTDLFVSAK*KLYDAILLSGILTVTDPST | 313 |
| S4 | 132 | -----GNELS------------------T*KEQISRN--------------------------------------------- | 144 |
| S1 | 314 | KAPLSASMIKRYDEHHQDLTLLKALVRQQLPEKYKEIFFDQSKNGYAGYIDGGASQEEFYKFIKPILEKM--DGTEELLV | 391 |
| S2 | 315 | KAPLSASMIKRYVEHHEDLEKLKEFIKANKSELYHDIFKDKNKNGYAGYIENGVKQDEFYKYLKNILSKIKIDGSDYFLD | 394 |
| S3 | 314 | KAPLSASMIERYENHQNDLAALKQFIKNNLPEKYDEVFSDQSKDGYAGYIDGKTTQETFYKYIKNLLSKF--EGTDYFLD | 391 |
| S4 | 145 | ----SKALEEKYVAELQ-------------------------------------------------LERLKKDG------ | 165 |
| S1 | 392 | KLNREDLLRKQRTFDNGS*IPHQIHLGELHAILRRQEDFYPFLKDNREKIEKILTFRIPYYVGPLARGNSRFAWMTRKSEE | 471 |
| S2 | 395 | KIEREDFLRKQRTFDNGS*IPHQIHLQEMHAILRRQGDYYPFLKEKQDRIEKILTFRIPYYVGPLVRKDSRFAWAEYRSDE | 474 |
| S3 | 392 | KIEREDFLRKQRTFDNGS*IPHQIHLQEMNAILRRQGEYYPFLKDNKEKIEKILTFRIPYYVGPLARGNRDFAWLTRNSDE | 471 |
| S4 | 166 | --EVRGSINRFKTSD---------YVKEAKQLLKVQKAYHQLDQSFIDTYIDLLETRRTYYEGP--GEGSPFGW------K | 227 |
| S1 | 472 | TITPWNFEE*VVDKGASAQSFIERMTNEDKNLPNEKVLPKHSLLYEYFTVYNELTKVKYVTEGMRKPAFLSGE*QKKAIVDL | 551 |
| S2 | 475 | KITPWNFDK*VIDKEKSAEKFITRMTLNDLYLPEEKVLPKHSHVYETYAVYNELTKIKYVNEQGKE-SFFDSN*MKQEIFDH | 553 |
| S3 | 472 | AIRPWNFEE*IVDKASSAEDFINKMTNYDLYLPEEKVLPKHSLLYETFAVYNELTKVKFIAEGLRDYQFLDSG*QKKQIVNQ | 551 |
| S4 | 228 | DIKEW----------------YEMLMGHCTYFPEELRSVKYAYNADLYNALNDLNNLVITRDENEK---LEYY*EKFQIIEN | 289 |
| S1 | 552 | LFKTNRKVTVKQLKEDYFKKIECFDSVEISGVEDR---FNASLGTYHDLLKIIKDKDFLDNEENEDILEDIVLTLTLFED | 628 |
| S2 | 554 | VFKENRKVTKEKLLNYLNKEFPEYRIKDLIGLDKENKSFNASLGTYHDLKKIL-DKAFLDDKVNEEVIEDIIKTLTLFED | 632 |
| S3 | 552 | LFKENRKVTEKDIIHYLHN-VDGYDGIELKGIEKQ---FNASLSTYHDLLKIIKDKEFMDDAKNEAILENIVHTLTIFED | 627 |
| S4 | 290 | VFKQKKKPTLKQIAKEILVNEEDIKGYRVTSTGKPEF---TNLKVYHDIKDITARKEII---ENAELLDQIAKILTIYQS | 363 |
| S1 | 629 | REMIEERLKTYAHLFDDKVMKQLKR-RRYTGWG*RLSRKLINGIRDKQSGKTILDFLKSDGFANRNFM*QLIHDDSLTEKED | 707 |
| S2 | 633 | KDMIHERLQKYSDIFTANQLKKLER-RHYTGWG*RLSYKLINGIRNKENNKTILDYLIDDGSANRNFM*QLINDDTLPFKQI | 711 |
| S3 | 628 | REMIKQRLAQYDSLFDEKVIKALTR-RHYTGWG*KLSAKLINGICDKQTGNTILDYLIDDGKINRNFM*QLINDDGLSFKEI | 706 |
| S4 | 364 | SEDIQEELTNLNSELTQEEIEQISNLKGYTGTH*NLSLKAINLILDE------LWHTNDNQIAIFNRL*KLVP--------- | 428 |
| S1 | 708 | [chemical structure] | 781 |
| S2 | 712 | [chemical structure] | 784 |
| S3 | 707 | [chemical structure] | 779 |
| S4 | 429 | [chemical structure] | 505 |
| S1 | 782 | KRIEEGIKELGSQIL-------KEHPVENTQLQNEKLYLYYLQNGRDMYVDQELDINRLSD----YDVDH*IVPQSFLKDD | 850 |
| S2 | 785 | KKLQNSLKELGSNILNEEKPSYIEDKVENSHLQNDQLFLYYIQNGKDMYTGDELDIDHLSD----YDIDH*IIPQAFIKDD | 860 |
| S3 | 780 | KRIEDSLKILASGL---DSNILKENPTDNNQLQNDRLFLYYLQNGKDMYTGEALDINQLSS----YDIDH*IIPQAFIKDD | 852 |
| S4 | 506 | ERIEEIIRTTGK---------------ENAKYLIEKIKLHDMQEGKCLYSLEAIPLEDLLNNPFNYEVDH*IIPRSVSFDN | 570 |
| S1 | 851 | [chemical structure] | 922 |
| S2 | 861 | [chemical structure] | 932 |
| S3 | 853 | [chemical structure] | 924 |
| S4 | 571 | [chemical structure] | 650 |
| S1 | 923 | [chemical structure] | 1002 |
| S2 | 933 | [chemical structure] | 1012 |
| S3 | 925 | [chemical structure] | 1004 |
| S4 | 651 | [chemical structure] | 712 |
| S1 | 1003 | [chemical structure] | 1077 |
| S2 | 1013 | [chemical structure] | 1083 |
| S3 | 1005 | [chemical structure] | 1081 |
| S4 | 713 | [chemical structure] | 764 |
| S1 | 1078 | [chemical structure] | 1149 |
| S2 | 1084 | [chemical structure] | 1158 |
| S3 | 1082 | [chemical structure] | 1156 |
| S4 | 765 | [chemical structure] | 835 |
| S1 | 1150 | EKGKSKKLKSVKELLGITIMERSSFEKNPI-DFLEAKG-----YKEVKKDLIIKLPKYSLFELENGRKRMLASAGE*LQKG | 1223 |
| S2 | 1159 | EKGKAKKLKTVKELVGISIMERSFFEENPV-EFLENKG-----YHNIREDKLIKLPKYSLFEFEGGRRRLLASASE*LQKG | 1232 |
| S3 | 1157 | EKGKAKKLKTVKTLVGITIMEKAAFEENPI-TFLENKG-----YHNVRKENILCLPKYSLFELENGRRRLLASAKE*LQKG | 1230 |
| S4 | 836 | DPQTYQKLK--------LIMEQYGDEKNPLYKYYEETGNYLTKYSKKDNGPVIKKIKYYGNKLNAHLDITDDYPNS*RNKV | 907 |
| S1 | 1224 | NELALPSKYVNFLYLASHYEKLKGSPEDNEQKQLFVEQHKHYLDEIIEQISEFSKRVILADANLDKVLSAYNKH------ | 1297 |
| S2 | 1233 | NEMVLPGYLVELLYHAHRADNF-----NSTEYLNYVSEHKKEFEKVLSCVEDFANLYVDVEKNLSKIRAVADSM------ | 1301 |
| S3 | 1231 | NEIVLPVYLTTLLYHSKNVHKL-----DEPGHLEYIQKHRNEFKDLLNLVSEFSQKYVLADANLEKIKSLYADN------ | 1299 |
| S4 | 908 | VKLSLKPYRFD-VYLDNGVYKFV-----TVKNLDVIK--KENYYEVNSKAYEEAKKLKKISNQAEFIASFYNNDLIKING | 979 |
| S1 | 1298 | RDKPIREQAENIIHLFTLTNLGAPAAFKYFDT*TIDRKRYTSTKEVLDATLIHQSIT--------GLYETRI----DLSQL | 1365 |
| S2 | 1302 | DNFSIEEISNSFINLLTLTALGAPADFNFLGE*KIPRKRYTSTKECLNATLIHQSIT--------GLYETRI----DLSKL | 1369 |
| S3 | 1300 | EQADIEILANSFINLLTFTALGAPAAFKFFGK*DIDRKRYTTVSEILNATLIHQSIT--------GLYETWI----DLSKL | 1367 |
| S4 | 980 | ELYRVIGVNNDLLNRIEVNMIDITYR-EYLEN*MNDKRPPRIIKTIASKT---QSIKKYSTDILGNLYEVKSKKHPQIIKK | 1055 |
| S1 | 1366 | GGD | 1368 |
| S2 | 1370 | GEE | 1372 |
| S3 | 1368 | GED | 1370 |
| S4 | 1056 | G-- | 1056 |

[0311] The alignment demonstrates that amino acid sequences and amino acid residues that are homologous to a reference Cas9 amino acid sequence or amino acid residue can be identified across Cas9 sequence variants, including, but not limited to Cas9 sequences from different species, by identifying the amino acid sequence or residue that aligns with the reference sequence or the reference residue using alignment programs and algorithms known in the art. This disclosure provides Cas9 variants in which one or more of the amino acid residues identified by an asterisk in SEQ ID NO: 9 are mutated as described herein. The residues in Cas9 sequences other than SEQ ID NO: 9 that correspond to the residues identified in SEQ ID NO: 9 by an asterisk are referred to herein as “homologous” or “corresponding” residues. Such homologous residues can be identified by sequence alignment, e.g., as described above, and by identifying the sequence or residue that aligns with the reference sequence or residue. Similarly, mutations in Cas9 sequences other than SEQ ID NO: 9 that correspond to mutations identified in SEQ ID NO: 9 herein, e.g., mutations of residues 10, 122, 137, 182, 262, 294, 409, 480, 543, 660, 694, 840, 1219, and 1329 in SEQ ID NO: 9, are referred to herein as “homologous” or “corresponding” mutations. For example, the mutations corresponding to the D10A mutation in S1 for the four aligned sequences above are D10A for S2, D9A for S3, and D13A for S4; the corresponding mutations for H840A in S1 are H850A for S2, H842A for S3, and H560 for S4; the corresponding mutation for X1219V in S1 are X1228V for S2, X1226 for S3, and X903V for S4, and so on.

[0312] A total of 250 Cas9 sequences (SEQ ID NOs: 10-262) from different species were aligned using the same algorithm and alignment parameters outlined above. Amino acid residues homologous to residues 10, 122, 137, 182, 262, 294, 409, 480, 543, 660, 694, 840, 1219, and 1329 were identified in the same manner as outlined above. The alignments are provided below. The HNH domain (bold and underlined) and the RuvC domain (boxed) are identified for each of the four sequences. Residues corresponding to amino acid residues 10, 122, 137, 182, 262, 294, 409, 480, 543, 660, 694, 840, 1219, and 1329 in SEQ ID NO: 9 are boxed in SEQ ID NO: 10 in the alignments, allowing for the identification of the corresponding amino acid residues in the aligned sequences.

[0313] Cas9 variants with one or more mutations in amino acid residues homologous to amino acid residues 122, 137, 182, 262, 294, 409, 480, 543, 660, 694, 1219, and 1329 of SEQ ID NO: 9 are provided herein. In some embodiments, the Cas9 variants provided herein comprise mutations corresponding to the D10A and the H840A mutations in SEQ ID NO: 9, resulting in a nuclease-inactive dCas9, and at least one, at least two, at least three, at least four, at least five, at least six, or at least seven mutations of amino acid residues homologous to amino acid residues 122, 137, 182, 262, 294, 409, 480, 543, 660, 694, 1219, and 1329 of SEQ ID NO: 9.

[0314] Cas9 variants with one or more mutations in amino acid residues homologous to amino acid residues 122, 137, 182, 262, 294, 409, 480, 543, 660, 694, 1219, and 1329 of SEQ ID NO: 9 are provided herein. In some embodiments, the Cas9 variants provided herein comprise mutations corresponding to the D10A mutations in SEQ ID NO: 9, resulting in a partially nuclease-inactive dCas9, wherein the Cas9 can nick the non-target strand but not the targeted strand, and at least one, at least two, at least three, at least four, at least five, at least six, or at least seven mutations of amino acid residues homologous to amino acid residues 122, 137, 182, 262, 294, 409, 480, 543, 660, 694, 1219, and 1329 of SEQ ID NO: 9.

| | | |
|---|---|---|
| WP_010922251.1 | type II CRISPR RNA-guided endonuclease Cas9 [Streptococcus pyogenes] | SEQ ID NO: 10 |
| WP_039695303.1 | type II CRISPR RNA-guided endonuclease Cas9 [Streptococcus gallolyticus] | SEQ ID NO: 11 |
| WP_045635197.1 | type II CRISPR RNA-guided endonuclease Cas9 [Streptococcus mitis] | SEQ ID NO: 12 |
| 5AXW_A | Cas9, Chain A, Crystal Structure [Staphylococcus aureus] | SEQ ID NO: 13 |
| WP_009880683.1 | type II CRISPR RNA-guided endonuclease Cas9 [Streptococcus pyogenes] | SEQ ID NO: 14 |
| WP_010922251.1 | type II CRISPR RNA-guided endonuclease Cas9 [Streptococcus pyogenes] | SEQ ID NO: 15 |
| WP_011054416.1 | type II CRISPR RNA-guided endonuclease Cas9 [Streptococcus pyogenes] | SEQ ID NO: 16 |
| WP_011284745.1 | type II CRISPR RNA-guided endonuclease Cas9 [Streptococcus pyogenes] | SEQ ID NO: 17 |
| WP_011285506.1 | type II CRISPR RNA-guided endonuclease Cas9 [Streptococcus pyogenes] | SEQ ID NO: 18 |
| WP_011527619.1 | type II CRISPR RNA-guided endonuclease Cas9 [Streptococcus pyogenes] | SEQ ID NO: 19 |
| WP_012560673.1 | type II CRISPR RNA-guided endonuclease Cas9 [Streptococcus pyogenes] | SEQ ID NO: 20 |
| WP_014407541.1 | type II CRISPR RNA-guided endonuclease Cas9 [Streptococcus pyogenes] | SEQ ID NO: 21 |
| WP_020905136.1 | type II CRISPR RNA-guided endonuclease Cas9 [Streptococcus pyogenes] | SEQ ID NO: 22 |
| WP_023080005.1 | type II CRISPR RNA-guided endonuclease Cas9 [Streptococcus pyogenes] | SEQ ID NO: 23 |
| WP_023610282.1 | type II CRISPR RNA-guided endonuclease Cas9 [Streptococcus pyogenes] | SEQ ID NO: 24 |
| WP_030125963.1 | type II CRISPR RNA-guided endonuclease Cas9 [Streptococcus pyogenes] | SEQ ID NO: 25 |
| WP_030126706.1 | type II CRISPR RNA-guided endonuclease Cas9 [Streptococcus pyogenes] | SEQ ID NO: 26 |
| WP_031488318.1 | type II CRISPR RNA-guided endonuclease Cas9 [Streptococcus pyogenes] | SEQ ID NO: 27 |
| WP_032460140.1 | type II CRISPR RNA-guided endonuclease Cas9 [Streptococcus pyogenes] | SEQ ID NO: 28 |
| WP_032461047.1 | type II CRISPR RNA-guided endonuclease Cas9 [Streptococcus pyogenes] | SEQ ID NO: 29 |
| WP_032462016.1 | type II CRISPR RNA-guided endonuclease Cas9 [Streptococcus pyogenes] | SEQ ID NO: 30 |
| WP_032462936.1 | type II CRISPR RNA-guided endonuclease Cas9 [Streptococcus pyogenes] | SEQ ID NO: 31 |
| WP_032464890.1 | type II CRISPR RNA-guided endonuclease Cas9 [Streptococcus pyogenes] | SEQ ID NO: 32 |
| WP_033888930.1 | type II CRISPR RNA-guided endonuclease Cas9 [Streptococcus pyogenes] | SEQ ID NO: 33 |
| WP_038431314.1 | type II CRISPR RNA-guided endonuclease Cas9 [Streptococcus pyogenes] | SEQ ID NO: 34 |
| WP_038432938.1 | type II CRISPR RNA-guided endonuclease Cas9 [Streptococcus pyogenes] | SEQ ID NO: 35 |
| WP_038434062.1 | type II CRISPR RNA-guided endonuclease Cas9 [Streptococcus pyogenes] | SEQ ID NO: 36 |
| BAQ51233.1 | CRISPR-associated protein, Csn1 family [Streptococcus pyogenes] | SEQ ID NO: 37 |
| KGE60162.1 | hypothetical protein MGA52111_0903 [Streptococcus pyogenes MGAS2111] | SEQ ID NO: 38 |
| KGE60856.1 | CRISPR-associated endonuclease protein [Streptococcus pyogenes SS1447] | SEQ ID NO: 39 |
| WP_002989955.1 | MULTISPECIES: type II CRISPR RNA-guided endonuclease Cas9 [Streptococcus] | SEQ ID NO: 40 |
| WP_003030002.1 | MULTISPECIES: type II CRISPR RNA-guided endonuclease Cas9 [Streptococcus] | SEQ ID NO: 41 |
| WP_003065552.1 | MULTISPECIES: type II CRISPR RNA-guided endonuclease Cas9 [Streptococcus] | SEQ ID NO: 42 |
| WP_001040076.1 | type II CRISPR RNA-guided endonuclease Cas9 [Streptococcus agalactiae] | SEQ ID NO: 43 |
| WP_001040078.1 | type II CRISPR RNA-guided endonuclease Cas9 [Streptococcus agalactiae] | SEQ ID NO: 44 |
| WP_001040080.1 | type II CRISPR RNA-guided endonuclease Cas9 [Streptococcus agalactiae] | SEQ ID NO: 45 |
| WP_001040081.1 | type II CRISPR RNA-guided endonuclease Cas9 [Streptococcus agalactiae] | SEQ ID NO: 46 |
| WP_001040083.1 | type II CRISPR RNA-guided endonuclease Cas9 [Streptococcus agalactiae] | SEQ ID NO: 47 |
| WP_001040085.1 | type II CRISPR RNA-guided endonuclease Cas9 [Streptococcus agalactiae] | SEQ ID NO: 48 |
| WP_001040087.1 | type II CRISPR RNA-guided endonuclease Cas9 [Streptococcus agalactiae] | SEQ ID NO: 49 |
| WP_001040088.1 | type II CRISPR RNA-guided endonuclease Cas9 [Streptococcus agalactiae] | SEQ ID NO: 50 |
| WP_001040089.1 | type II CRISPR RNA-guided endonuclease Cas9 [Streptococcus agalactiae] | SEQ ID NO: 51 |
| WP_001040090.1 | type II CRISPR RNA-guided endonuclease Cas9 [Streptococcus agalactiae] | SEQ ID NO: 52 |
| WP_001040091.1 | type II CRISPR RNA-guided endonuclease Cas9 [Streptococcus agalactiae] | SEQ ID NO: 53 |
| WP_001040092.1 | type II CRISPR RNA-guided endonuclease Cas9 [Streptococcus agalactiae] | SEQ ID NO: 54 |
| WP_001040094.1 | type II CRISPR RNA-guided endonuclease Cas9 [Streptococcus agalactiae] | SEQ ID NO: 55 |
| WP_001040095.1 | type II CRISPR RNA-guided endonuclease Cas9 [Streptococcus agalactiae] | SEQ ID NO: 56 |
| WP_001040096.1 | type II CRISPR RNA-guided endonuclease Cas9 [Streptococcus agalactiae] | SEQ ID NO: 57 |
| WP_001040097.1 | type II CRISPR RNA-guided endonuclease Cas9 [Streptococcus agalactiae] | SEQ ID NO: 58 |
| WP_001040098.1 | type II CRISPR RNA-guided endonuclease Cas9 [Streptococcus agalactiae] | SEQ ID NO: 59 |
| WP_001040099.1 | type II CRISPR RNA-guided endonuclease Cas9 [Streptococcus agalactiae] | SEQ ID NO: 60 |
| WP_001040100.1 | type II CRISPR RNA-guided endonuclease Cas9 [Streptococcus agalactiae] | SEQ ID NO: 61 |
| WP_001040104.1 | type II CRISPR RNA-guided endonuclease Cas9 [Streptococcus agalactiae] | SEQ ID NO: 62 |
| WP_001040105.1 | type II CRISPR RNA-guided endonuclease Cas9 [Streptococcus agalactiae] | SEQ ID NO: 63 |
| WP_001040106.1 | type II CRISPR RNA-guided endonuclease Cas9 [Streptococcus agalactiae] | SEQ ID NO: 64 |
| WP_001040107.1 | type II CRISPR RNA-guided endonuclease Cas9 [Streptococcus agalactiae] | SEQ ID NO: 65 |
| WP_001040108.1 | type II CRISPR RNA-guided endonuclease Cas9 [Streptococcus agalactiae] | SEQ ID NO: 66 |
| WP_001040109.1 | type II CRISPR RNA-guided endonuclease Cas9 [Streptococcus agalactiae] | SEQ ID NO: 67 |
| WP_001040110.1 | type II CRISPR RNA-guided endonuclease Cas9 [Streptococcus agalactiae] | SEQ ID NO: 68 |
| WP_015058523.1 | type II CRISPR RNA-guided endonuclease Cas9 [Streptococcus agalactiae] | SEQ ID NO: 69 |
| WP_017643650.1 | type II CRISPR RNA-guided endonuclease Cas9 [Streptococcus agalactiae] | SEQ ID NO: 70 |
| WP_017647151.1 | type II CRISPR RNA-guided endonuclease Cas9 [Streptococcus agalactiae] | SEQ ID NO: 71 |
| WP_017648376.1 | type II CRISPR RNA-guided endonuclease Cas9 [Streptococcus agalactiae] | SEQ ID NO: 72 |
| WP_017649527.1 | type II CRISPR RNA-guided endonuclease Cas9 [Streptococcus agalactiae] | SEQ ID NO: 73 |
| WP_017771611.1 | type II CRISPR RNA-guided endonuclease Cas9 [Streptococcus agalactiae] | SEQ ID NO: 74 |
| WP_017771984.1 | type II CRISPR RNA-guided endonuclease Cas9 [Streptococcus agalactiae] | SEQ ID NO: 75 |
| CFQ25032.1 | CRISPR-associated protein [Streptococcus agalactiae] | SEQ ID NO: 76 |
| CFV16040.1 | CRISPR-associated protein [Streptococcus agalactiae] | SEQ ID NO: 77 |
| KLJ37842.1 | CRISPR-associated protein Csn1 [Streptococcus agalactiae] | SEQ ID NO: 78 |
| KLJ72361.1 | CRISPR-associated protein Csn1 [Streptococcus agalactiae] | SEQ ID NO: 79 |
| KLL20707.1 | CRISPR-associated protein Csn1 [Streptococcus agalactiae] | SEQ ID NO: 80 |
| KLL42645.1 | CRISPR-associated protein Csn1 [Streptococcus agalactiae] | SEQ ID NO: 81 |
| WP_047207273.1 | type II CRISPR RNA-guided endonuclease Cas9 [Streptococcus agalactiae] | SEQ ID NO: 82 |
| WP_047209694.1 | type II CRISPR RNA-guided endonuclease Cas9 [Streptococcus agalactiae] | SEQ ID NO: 83 |
| WP_050198062.1 | type II CRISPR RNA-guided endonuclease Cas9 [Streptococcus agalactiae] | SEQ ID NO: 84 |
| WP_050201642.1 | type II CRISPR RNA-guided endonuclease Cas9 [Streptococcus agalactiae] | SEQ ID NO: 85 |
| WP_050204027.1 | type II CRISPR RNA-guided endonuclease Cas9 [Streptococcus agalactiae] | SEQ ID NO: 86 |
| WP_050881965.1 | type II CRISPR RNA-guided endonuclease Cas9 [Streptococcus agalactiae] | SEQ ID NO: 87 |
| WP_050886065.1 | type II CRISPR RNA-guided endonuclease Cas9 [Streptococcus agalactiae] | SEQ ID NO: 88 |
| AHN30376.1 | CRISPR-associated protein Csn1 [Streptococcus agalactiae 138P] | SEQ ID NO: 89 |
| EAO78426.1 | reticulocyte binding protein [Streptococcus agalactiae H36B] | SEQ ID NO: 90 |
| CCW42055.1 | CRISPR-associated protein, SAG0894 family [Streptococcus agalactiae ILRI112] | SEQ ID NO: 91 |
| WP_003041502.1 | type II CRISPR RNA-guided endonuclease Cas9 [Streptococcus anginosus] | SEQ ID NO: 92 |
| WP_037593752.1 | type II CRISPR RNA-guided endonuclease Cas9 [Streptococcus anginosus] | SEQ ID NO: 93 |
| WP_049516684.1 | CRISPR-associated protein Csn1 [Streptococcus anginosus] | SEQ ID NO: 94 |
| GAD46167.1 | hypothetical protein ANG6_0662 [Streptococcus anginosus T5] | SEQ ID NO: 95 |
| WP_018363470.1 | type II CRISPR RNA-guided endonuclease Cas9 [Streptococcus caballi] | SEQ ID NO: 96 |
| WP_003043819.1 | type II CRISPR RNA-guided endonuclease Cas9 [Streptococcus canis] | SEQ ID NO: 97 |
| WP_006269658.1 | type II CRISPR RNA-guided endonuclease Cas9 [Streptococcus constellatus] | SEQ ID NO: 98 |
| WP_048800889.1 | type II CRISPR RNA-guided endonuclease Cas9 [Streptococcus constellatus] | SEQ ID NO: 99 |
| WP_012767106.1 | type II CRISPR RNA-guided endonuclease Cas9 [Streptococcus dysgalactiae] | SEQ ID NO: 100 |
| WP_014612333.1 | type II CRISPR RNA-guided endonuclease Cas9 [Streptococcus dysgalactiae] | SEQ ID NO: 101 |
| WP_015017095.1 | type II CRISPR RNA-guided endonuclease Cas9 [Streptococcus dysgalactiae] | SEQ ID NO: 102 |
| WP_015057649.1 | type II CRISPR RNA-guided endonuclease Cas9 [Streptococcus dysgalactiae] | SEQ ID NO: 103 |
| WP_048327215.1 | type II CRISPR RNA-guided endonuclease Cas9 [Streptococcus dysgalactiae] | SEQ ID NO: 104 |
| WP_049519324.1 | CRISPR-associated protein Csn1 [Streptococcus dysgalactiae] | SEQ ID NO: 105 |
| WP_012515931.1 | type II CRISPR RNA-guided endonuclease Cas9 [Streptococcus equi] | SEQ ID NO: 106 |
| WP_021320964.1 | type II CRISPR RNA-guided endonuclease Cas9 [Streptococcus equi] | SEQ ID NO: 107 |
| WP_037581760.1 | type II CRISPR RNA-guided endonuclease Cas9 [Streptococcus equi] | SEQ ID NO: 108 |
| WP_004232481.1 | type II CRISPR RNA-guided endonuclease Cas9 [Streptococcus equinus] | SEQ ID NO: 109 |
| WP_009854540.1 | type II CRISPR RNA-guided endonuclease Cas9 [Streptococcus gallolyticus] | SEQ ID NO: 110 |
| WP_012962174.1 | type II CRISPR RNA-guided endonuclease Cas9 [Streptococcus gallolyticus] | SEQ ID NO: 111 |
| WP_039695303.1 | type II CRISPR RNA-guided endonuclease Cas9 [Streptococcus gallolyticus] | SEQ ID NO: 112 |
| WP_014334983.1 | type II CRISPR RNA-guided endonuclease Cas9 [Streptococcus infantarius] | SEQ ID NO: 113 |
| WP_003099269.1 | type II CRISPR RNA-guided endonuclease Cas9 [Streptococcus iniae] | SEQ ID NO: 114 |
| AHY15608.1 | CRISPR-associated protein Csn1 [Streptococcus iniae] | SEQ ID NO: 115 |
| AHY17476.1 | CRISPR-associated protein Csn1 [Streptococcus iniae] | SEQ ID NO: 116 |
| ESR09100.1 | hypothetical protein IUSA1_08595 [Streptococcus iniae IUSA1] | SEQ ID NO: 117 |
| AGM98575.1 | CRISPR-associated protein Cas9/Csn1, subtype II/NMEMI [Streptococcus iniae SF1] | SEQ ID NO: 118 |
| ALF27331.1 | CRISPR-associated protein Csn1 [Streptococcus intermedius] | SEQ ID NO: 119 |
| WP_018372492.1 | type II CRISPR RNA-guided endonuclease Cas9 [Streptococcus massiliensis] | SEQ ID NO: 120 |
| WP_045618028.1 | type II CRISPR RNA-guided endonuclease Cas9 [Streptococcus mitis] | SEQ ID NO: 121 |
| WP_045635197.1 | type II CRISPR RNA-guided endonuclease Cas9 [Streptococcus mitis] | SEQ ID NO: 122 |
| WP_002263549.1 | type II CRISPR RNA-guided endonuclease Cas9 [Streptococcus mutans] | SEQ ID NO: 123 |
| WP_002263887.1 | type II CRISPR RNA-guided endonuclease Cas9 [Streptococcus mutans] | SEQ ID NO: 124 |
| WP_002264920.1 | type II CRISPR RNA-guided endonuclease Cas9 [Streptococcus mutans] | SEQ ID NO: 125 |
| WP_002269043.1 | type II CRISPR RNA-guided endonuclease Cas9 [Streptococcus mutans] | SEQ ID NO: 126 |
| WP_002269448.1 | type II CRISPR RNA-guided endonuclease Cas9 [Streptococcus mutans] | SEQ ID NO: 127 |
| WP_002271977.1 | type II CRISPR RNA-guided endonuclease Cas9 [Streptococcus mutans] | SEQ ID NO: 128 |
| WP_002272766.1 | type II CRISPR RNA-guided endonuclease Cas9 [Streptococcus mutans] | SEQ ID NO: 129 |
| WP_002273241.1 | type II CRISPR RNA-guided endonuclease Cas9 [Streptococcus mutans] | SEQ ID NO: 130 |
| WP_002275430.1 | type II CRISPR RNA-guided endonuclease Cas9 [Streptococcus mutans] | SEQ ID NO: 131 |
| WP_002276448.1 | type II CRISPR RNA-guided endonuclease Cas9 [Streptococcus mutans] | SEQ ID NO: 132 |
| WP_002277050.1 | type II CRISPR RNA-guided endonuclease Cas9 [Streptococcus mutans] | SEQ ID NO: 133 |
| WP_002277364.1 | type II CRISPR RNA-guided endonuclease Cas9 [Streptococcus mutans] | SEQ ID NO: 134 |
| WP_002279025.1 | type II CRISPR RNA-guided endonuclease Cas9 [Streptococcus mutans] | SEQ ID NO: 135 |
| WP_002279859.1 | type II CRISPR RNA-guided endonuclease Cas9 [Streptococcus mutans] | SEQ ID NO: 136 |
| WP_002280230.1 | type II CRISPR RNA-guided endonuclease Cas9 [Streptococcus mutans] | SEQ ID NO: 137 |
| WP_002281696.1 | type II CRISPR RNA-guided endonuclease Cas9 [Streptococcus mutans] | SEQ ID NO: 138 |
| WP_002282247.1 | type II CRISPR RNA-guided endonuclease Cas9 [Streptococcus mutans] | SEQ ID NO: 139 |
| WP_002282906.1 | type II CRISPR RNA-guided endonuclease Cas9 [Streptococcus mutans] | SEQ ID NO: 140 |
| WP_002283846.1 | type II CRISPR RNA-guided endonuclease Cas9 [Streptococcus mutans] | SEQ ID NO: 141 |
| WP_002287255.1 | type II CRISPR RNA-guided endonuclease Cas9 [Streptococcus mutans] | SEQ ID NO: 142 |
| WP_002288990.1 | type II CRISPR RNA-guided endonuclease Cas9 [Streptococcus mutans] | SEQ ID NO: 143 |
| WP_002289641.1 | type II CRISPR RNA-guided endonuclease Cas9 [Streptococcus mutans] | SEQ ID NO: 144 |
| WP_002290427.1 | type II CRISPR RNA-guided endonuclease Cas9 [Streptococcus mutans] | SEQ ID NO: 145 |
| WP_002295753.1 | type II CRISPR RNA-guided endonuclease Cas9 [Streptococcus mutans] | SEQ ID NO: 146 |
| WP_002296423.1 | type II CRISPR RNA-guided endonuclease Cas9 [Streptococcus mutans] | SEQ ID NO: 147 |
| WP_002304487.1 | type II CRISPR RNA-guided endonuclease Cas9 [Streptococcus mutans] | SEQ ID NO: 148 |
| WP_002305844.1 | type II CRISPR RNA-guided endonuclease Cas9 [Streptococcus mutans] | SEQ ID NO: 149 |
| WP_002307203.1 | type II CRISPR RNA-guided endonuclease Cas9 [Streptococcus mutans] | SEQ ID NO: 150 |
| WP_002310390.1 | type II CRISPR RNA-guided endonuclease Cas9 [Streptococcus mutans] | SEQ ID NO: 151 |
| WP_002352408.1 | type II CRISPR RNA-guided endonuclease Cas9 [Streptococcus mutans] | SEQ ID NO: 152 |
| WP_012997688.1 | type II CRISPR RNA-guided endonuclease Cas9 [Streptococcus mutans] | SEQ ID NO: 153 |
| WP_014677909.1 | type II CRISPR RNA-guided endonuclease Cas9 [Streptococcus mutans] | SEQ ID NO: 154 |
| WP_019312892.1 | type II CRISPR RNA-guided endonuclease Cas9 [Streptococcus mutans] | SEQ ID NO: 155 |
| WP_019313659.1 | type II CRISPR RNA-guided endonuclease Cas9 [Streptococcus mutans] | SEQ ID NO: 156 |
| WP_019314093.1 | type II CRISPR RNA-guided endonuclease Cas9 [Streptococcus mutans] | SEQ ID NO: 157 |
| WP_019315370.1 | type II CRISPR RNA-guided endonuclease Cas9 [Streptococcus mutans] | SEQ ID NO: 158 |
| WP_019803776.1 | type II CRISPR RNA-guided endonuclease Cas9 [Streptococcus mutans] | SEQ ID NO: 159 |
| WP_019805234.1 | type II CRISPR RNA-guided endonuclease Cas9 [Streptococcus mutans] | SEQ ID NO: 160 |
| WP_024783594.1 | type II CRISPR RNA-guided endonuclease Cas9 [Streptococcus mutans] | SEQ ID NO: 161 |
| WP_024784288.1 | type II CRISPR RNA-guided endonuclease Cas9 [Streptococcus mutans] | SEQ ID NO: 162 |
| WP_024784666.1 | type II CRISPR RNA-guided endonuclease Cas9 [Streptococcus mutans] | SEQ ID NO: 163 |
| WP_024784894.1 | type II CRISPR RNA-guided endonuclease Cas9 [Streptococcus mutans] | SEQ ID NO: 164 |
| WP_024786433.1 | type II CRISPR RNA-guided endonuclease Cas9 [Streptococcus mutans] | SEQ ID NO: 165 |
| WP_049473442.1 | CRISPR-associated protein Csn1 [Streptococcus mutans] | SEQ ID NO: 166 |
| WP_049474547.1 | CRISPR-associated protein Csn1 [Streptococcus mutans] | SEQ ID NO: 167 |
| EMC03581.1 | hypothetical protein SMU69_09359 [Streptococcus mutans NLML4] | SEQ ID NO: 168 |
| WP_000428612.1 | type II CRISPR RNA-guided endonuclease Cas9 [Streptococcus oralis] | SEQ ID NO: 169 |
| WP_000428613.1 | type II CRISPR RNA-guided endonuclease Cas9 [Streptococcus oralis] | SEQ ID NO: 170 |
| WP_049523028.1 | CRISPR-associated protein Csn1 [Streptococcus parasanguinis] | SEQ ID NO: 171 |
| WP_003107102.1 | type II CRISPR RNA-guided endonuclease Cas9 [Streptococcus parauberis] | SEQ ID NO: 172 |
| WP_054279288.1 | type II CRISPR RNA-guided endonuclease Cas9 [Streptococcus phocae] | SEQ ID NO: 173 |
| WP_049531101.1 | CRISPR-associated protein Csn1 [Streptococcus pseudopneumoniae] | SEQ ID NO: 174 |
| WP_049538452.1 | CRISPR-associated protein Csn1 [Streptococcus pseudopneumoniae] | SEQ ID NO: 175 |
| WP_049549711.1 | CRISPR-associated protein Csn1 [Streptococcus pseudopneumoniae] | SEQ ID NO: 176 |
| WP_007896501.1 | type II CRISPR RNA-guided endonuclease Cas9 [Streptococcus pseudoporcinus] | SEQ ID NO: 177 |
| EFR44625.1 | CRISPR-associated protein, Csn1 family [Streptococcus pseudoporcinus SPIN 20026] | SEQ ID NO: 178 |
| WP_002897477.1 | type II CRISPR RNA-guided endonuclease Cas9 [Streptococcus sanguinis] | SEQ ID NO: 179 |
| WP_002906454.1 | type II CRISPR RNA-guided endonuclease Cas9 [Streptococcus sanguinis] | SEQ ID NO: 180 |
| WP_009729476.1 | type II CRISPR RNA-guided endonuclease Cas9 [Streptococcus sp. F0441] | SEQ ID NO: 181 |
| CQR24647.1 | CRISPR-associated protein [Streptococcus sp. FF10] | SEQ ID NO: 182 |
| WP_000066813.1 | type II CRISPR RNA-guided endonuclease Cas9 [Streptococcus sp. M334] | SEQ ID NO: 183 |
| WP_009754323.1 | type II CRISPR RNA-guided endonuclease Cas9 [Streptococcus sp. taxon 056] | SEQ ID NO: 184 |
| WP_044674937.1 | type II CRISPR RNA-guided endonuclease Cas9 [Streptococcus suis] | SEQ ID NO: 185 |
| WP_044676715.1 | type II CRISPR RNA-guided endonuclease Cas9 [Streptococcus suis] | SEQ ID NO: 186 |
| WP_044680361.1 | type II CRISPR RNA-guided endonuclease Cas9 [Streptococcus suis] | SEQ ID NO: 187 |
| WP_044681799.1 | type II CRISPR RNA-guided endonuclease Cas9 [Streptococcus suis] | SEQ ID NO: 188 |
| WP_049533112.1 | CRISPR-associated protein Csn1 [Streptococcus suis] | SEQ ID NO: 189 |
| WP_029090905.1 | type II CRISPR RNA-guided endonuclease Cas9 [Brochothrix thermosphacta] | SEQ ID NO: 190 |
| WP_006506696.1 | type II CRISPR RNA-guided endonuclease Cas9 [Catenibacterium mitsuokai] | SEQ ID NO: 191 |
| AIT42264.1 | Cas9hc:NLS:HA [Cloning vector pYB196] | SEQ ID NO: 192 |
| WP_034440723.1 | type II CRISPR endonuclease Cas9 [Clostridiales bacterium S5-A11] | SEQ ID NO: 193 |
| AKQ21048.1 | Cas9 [CRISPR-mediated gene targeting vector p(bh5p68-Cas9)] | SEQ ID NO: 194 |
| WP_004636532.1 | type II CRISPR RNA-guided endonuclease Cas9 [Dolosigranulum pigrum] | SEQ ID NO: 195 |
| WP_002364836.1 | MULTISPECIES: type II CRISPR RNA-guided endonuclease Cas9 [Enterococcus] | SEQ ID NO: 196 |
| WP_016631044.1 | MULTISPECIES: type II CRISPR RNA-guided endonuclease Cas9 [Enterococcus] | SEQ ID NO: 197 |
| EM575795.1 | hypothetical protein H318_06676 [Enterococcus durans IPLA 655] | SEQ ID NO: 198 |
| WP_002373311.1 | type II CRISPR RNA-guided endonuclease Cas9 [Enterococcus faecalis] | SEQ ID NO: 199 |
| WP_002378009.1 | type II CRISPR RNA-guided endonuclease Cas9 [Enterococcus faecalis] | SEQ ID NO: 200 |
| WP_002407324.1 | type II CRISPR RNA-guided endonuclease Cas9 [Enterococcus faecalis] | SEQ ID NO: 201 |
| WP_002413717.1 | type II CRISPR RNA-guided endonuclease Cas9 [Enterococcus faecalis] | SEQ ID NO: 202 |
| WP_010775580.1 | type II CRISPR RNA-guided endonuclease Cas9 [Enterococcus faecalis] | SEQ ID NO: 203 |
| WP_010818269.1 | type II CRISPR RNA-guided endonuclease Cas9 [Enterococcus faecalis] | SEQ ID NO: 204 |
| WP_010824395.1 | type II CRISPR RNA-guided endonuclease Cas9 [Enterococcus faecalis] | SEQ ID NO: 205 |
| WP_016622645.1 | type II CRISPR RNA-guided endonuclease Cas9 [Enterococcus faecalis] | SEQ ID NO: 206 |
| WP_033624816.1 | type II CRISPR RNA-guided endonuclease Cas9 [Enterococcus faecalis] | SEQ ID NO: 207 |
| WP_033625576.1 | type II CRISPR RNA-guided endonuclease Cas9 [Enterococcus faecalis] | SEQ ID NO: 208 |
| WP_033789179.1 | type II CRISPR RNA-guided endonuclease Cas9 [Enterococcus faecalis] | SEQ ID NO: 209 |
| WP_002310644.1 | type II CRISPR RNA-guided endonuclease Cas9 [Enterococcus faecium] | SEQ ID NO: 210 |
| WP_002312694.1 | type II CRISPR RNA-guided endonuclease Cas9 [Enterococcus faecium] | SEQ ID NO: 211 |
| WP_002314015.1 | type II CRISPR RNA-guided endonuclease Cas9 [Enterococcus faecium] | SEQ ID NO: 212 |
| WP_002320716.1 | type II CRISPR RNA-guided endonuclease Cas9 [Enterococcus faecium] | SEQ ID NO: 213 |
| WP_002330729.1 | type II CRISPR RNA-guided endonuclease Cas9 [Enterococcus faecium] | SEQ ID NO: 214 |
| WP_002335161.1 | type II CRISPR RNA-guided endonuclease Cas9 [Enterococcus faecium] | SEQ ID NO: 215 |
| WP_002345439.1 | type II CRISPR RNA-guided endonuclease Cas9 [Enterococcus faecium] | SEQ ID NO: 216 |
| WP_034867970.1 | type II CRISPR RNA-guided endonuclease Cas9 [Enterococcus faecium] | SEQ ID NO: 217 |
| WP_047937432.1 | type II CRISPR RNA-guided endonuclease Cas9 [Enterococcus faecium] | SEQ ID NO: 218 |
| WP_010720994.1 | type II CRISPR RNA-guided endonuclease Cas9 [Enterococcus hirae] | SEQ ID NO: 219 |
| WP_010737004.1 | type II CRISPR RNA-guided endonuclease Cas9 [Enterococcus hirae] | SEQ ID NO: 220 |
| WP_034700478.1 | type II CRISPR RNA-guided endonuclease Cas9 [Enterococcus hirae] | SEQ ID NO: 221 |
| WP_007209003.1 | type II CRISPR RNA-guided endonuclease Cas9 [Enterococcus italicus] | SEQ ID NO: 222 |
| WP_023519017.1 | type II CRISPR RNA-guided endonuclease Cas9 [Enterococcus mundtii] | SEQ ID NO: 223 |
| WP_010770040.1 | type II CRISPR RNA-guided endonuclease Cas9 [Enterococcus phoeniculicola] | SEQ ID NO: 224 |
| WP_048604708.1 | type II CRISPR RNA-guided endonuclease Cas9 [Enterococcus sp. AM1] | SEQ ID NO: 225 |
| WP_010750235.1 | type II CRISPR RNA-guided endonuclease Cas9 [Enterococcus villorum] | SEQ ID NO: 226 |
| AII16583.1 | Cas9 endonuclease [Expression vector pCas9] | SEQ ID NO: 227 |
| WP_029073316.1 | type II CRISPR RNA-guided endonuclease Cas9 [Kandleria vitulina] | SEQ ID NO: 228 |
| WP_031589969.1 | type II CRISPR RNA-guided endonuclease Cas9 [Kandleria vitulina] | SEQ ID NO: 229 |
| KDA45870.1 | CRISPR-associated protein Cas9/Csn1, subtype II/NMEMI [Lactobacillus animalis] | SEQ ID NO: 230 |
| WP_039099354.1 | type II CRISPR RNA-guided endonuclease Cas9 [Lactobacillus curvatus] | SEQ ID NO: 231 |
| AKP02966.1 | hypothetical protein ABB45 04605 [Lactobacillus farciminis] | SEQ ID NO: 232 |
| WP_010991369.1 | type II CRISPR RNA-guided endonuclease Cas9 [Listeria innocua] | SEQ ID NO: 233 |
| WP_033838504.1 | type II CRISPR RNA-guided endonuclease Cas9 [Listeria innocua] | SEQ ID NO: 234 |
| EHN60060.1 | CRISPR-associated protein, Csn1 family [Listeria innocua ATCC 33091] | SEQ ID NO: 235 |
| EFR89594.1 | crispr-associated protein, Csn1 family [Listeria innocua FSL S4-378] | SEQ ID NO: 236 |
| WP_038409211.1 | type II CRISPR RNA-guided endonuclease Cas9 [Listeria ivanovii] | SEQ ID NO: 237 |
| EFR95520.1 | crispr-associated protein Csn1 [Listeria ivanovii FSL F6-596] | SEQ ID NO: 238 |
| WP_003723650.1 | type II CRISPR RNA-guided endonuclease Cas9 [Listeria monocytogenes] | SEQ ID NO: 239 |
| WP_003727705.1 | type II CRISPR RNA-guided endonuclease Cas9 [Listeria monocytogenes] | SEQ ID NO: 240 |
| WP_003730785.1 | type II CRISPR RNA-guided endonuclease Cas9 [Listeria monocytogenes] | SEQ ID NO: 241 |
| WP_003733029.1 | type II CRISPR RNA-guided endonuclease Cas9 [Listeria monocytogenes] | SEQ ID NO: 242 |
| WP_003739838.1 | type II CRISPR RNA-guided endonuclease Cas9 [Listeria monocytogenes] | SEQ ID NO: 243 |
| WP_014601172.1 | type II CRISPR RNA-guided endonuclease Cas9 [Listeria monocytogenes] | SEQ ID NO: 244 |
| WP_023548323.1 | type II CRISPR RNA-guided endonuclease Cas9 [Listeria monocytogenes] | SEQ ID NO: 245 |
| WP_031665337.1 | type II CRISPR RNA-guided endonuclease Cas9 [Listeria monocytogenes] | SEQ ID NO: 246 |
| WP_031669209.1 | type II CRISPR RNA-guided endonuclease Cas9 [Listeria monocytogenes] | SEQ ID NO: 247 |
| WP_033920898.1 | type II CRISPR RNA-guided endonuclease Cas9 [Listeria monocytogenes] | SEQ ID NO: 248 |
| AKI42028.1 | CRISPR-associated protein [Listeria monocytogenes] | SEQ ID NO: 249 |
| AKI50529.1 | CRISPR-associated protein [Listeria monocytogenes] | SEQ ID NO: 250 |
| EFR83390.1 | crispr-associated protein Csn1 [Listeria monocytogenes FSL F2-208] | SEQ ID NO: 251 |
| WP_046323366.1 | type II CRISPR RNA-guided endonuclease Cas9 [Listeria seeligeri] | SEQ ID NO: 252 |
| AKE81011.1 | Cas9 [Plant multiplex genome editing vector pYLCRISPR/Cas9Pubi-H] | SEQ ID NO: 253 |
| CUO82355.1 | Uncharacterized protein conserved in bacteria [Roseburia hominis] | SEQ ID NO: 254 |
| WP_033162887.1 | type II CRISPR RNA-guided endonuclease Cas9 [Sharpea azabuensis] | SEQ ID NO: 255 |
| AGZ01981.1 | Cas9 endonuclease [synthetic construct] | SEQ ID NO: 256 |
| AKA60242.1 | nuclease deficient Cas9 [synthetic construct] | SEQ ID NO: 257 |
| AK540380.1 | Cas9 [Synthetic plasmid pFC330] | SEQ ID NO: 258 |
| 4UN5_B | Cas9, Chain B, Crystal Structure | SEQ ID NO: 259 |

| | | | |
|---|---|---|---|
| WP_010922251 | 1 | [chemical structure] | 73 |
| WP_039695303 | 1 | MTKKnYSIGLDIGTNSVGWAVITDDYKVPAKKMKVLGNTDKKYIKKNLLGALLFDSGETA--EATRLKRTARRRYT | 74 |
| WP_045635197 | 1 | K-KG-YSIGLDIGTNSVGFAVITDDYKVPSKKMKVLGNTDKRFIKKNLIGALLFDEGTTA--EARRLKRTARRRYT | 73 |
| 5AXW_A | 1 | MKRN-YILGLDIGITSVGYGII--DYET------------RDVIDA---GVRLFKEANVEnnEGRRSKRGARRLKR | 61 |
| WP_009880683 | | ---------------------------------------------------------------------------- | |
| WP_010922251 | 1 | MDKK-YSIGLDIGINSVGWAVITDEYKVPSKKFKVLGNIDRHSIKKNLIGALLFDSGETA--EATRLKRTARRRYT | 73 |
| WP_011054416 | 1 | MDKK-YSIGLDIGINSVGWAVITDDYKVPSKKLKGLGNIDRHGIKKNLIGALLFDSGETA--EATRLKRTARRRYT | 73 |
| WP_011284745 | 1 | MDKK-YSIGLDIGINSVGWAVITDDYKVPSKKFKVLGNIDRHSIKKNLIGALLFDSGETA--EATRLKRTARRRYT | 73 |
| WP_011285506 | 1 | MDKK-YSIGLDIGINSVGWAVITDDYKVPSKKFKVLGNIDRHSIKKNLIGALLFDSGETA--EATRLKRTARRRYT | 73 |
| WP_011527619 | 1 | MDKK-YSIGLDIGINSVGWAVITDDYKVPSKKFKVLGNIDRHSIKKNLIGALLFDSGEIA--EATRLKRTARRRYT | 73 |
| WP_012560673 | 1 | MDKK-YSIGLDIGINSVGWAVITDDYKVPSKKFKVLGNIDRHSIKKNLIGALLFDSGETA--EATRLKRTARRRYT | 73 |
| WP_014407541 | 1 | MDKK-YSIGLDIGINSVGWAVITDDYKVPSKKFKVLGNIDRHSIKKNLIGALLFGSGETA--EATRLKRTARRRYT | 73 |
| WP_020905136 | 1 | MDKK-YSIGLDIGINSVGWAVITDDYKVPSKKFKVLGNIDRHSIKKNLIGALLFDSGETA--EATRLKRTARRRYT | 73 |
| WP_023080005 | 1 | MDKK-YSIGLDIGINSVGWAVITDDYKVPSKKLKVLGNIDRHGIKKNLIGALLFDSGETA--EATRLKRTARRRYT | 73 |
| WP_023610282 | 1 | MDKK-YSIGLDIGINSVGWAVITDDYKVPSKKLKVLGNIDRHGIKKNLIGALLFDSGETA--EATRLKRTARRRYT | 73 |
| WP_030125963 | 1 | MDKK-YSIGLDIGINSVGWAVITDDYKVPSKKFKVLGNIDRHSIKKNLIGALLFDSGETA--EATRLKRTARRRYT | 73 |
| WP_030126706 | 1 | MDKK-YSIGLDIGINSVGWAVITDDYKVPSKKFKVLGNIDRHGIKKNLIGALLFDSGETA--EATRLKRTARRRYT | 73 |
| WP_031488318 | 1 | MDKK-YSIGLDIGINSVGWAVITDDYKVPSKKFKVLGNIDRHSIKKNLIGALLFDSGETA--EATRLKRTARRRYT | 73 |
| WP_032460140 | 1 | MDKK-YSIGLDIGINSVGWAVITDDYKVPSKKFKVLGNIDRHSIKKNLIGALLFDSGETA--EATRLKRTARRRYT | 73 |
| WP_032461047 | 1 | MDKK-YSIGLDIGINSVGWAVITDDYKVPSKKFKVLGNIDRHSIKKNLIGALLFDSGETA--EATRLKRTARRRYT | 73 |
| WP_032462016 | 1 | MDKK-YSIGLDIGINSVGWAVITDDYKVPSKKFKVLGNIDRHSIKKNLIGALLFDSGETA--EATRLKRTARRRYT | 73 |
| WP_032462936 | 1 | MDKK-YSIGLDIGINSVGWAVITDDYKVPSKKFKVLGNIDRHSIKKNLIGALLFDSGETA--EATRLKRTARRRYT | 73 |
| WP_032464890 | 1 | MDKK-YSIGLDIGTNSVGWAVITDDYKVPSKKFKVLGNTDRHSIKKNLIGALLFDSGEIA--EATRLKRTARRRYT | 73 |
| WP_033888930 | | ---------------------------------------------------------------------------- | |
| WP_038431314 | 1 | MDKK-YSIGLDIGTNSVGWAVITDDYKVPSKKFKVLGNTDRHSIKKNLIGALLFDSGETA--EATRLKRTARRRYT | 73 |
| WP_038432938 | 1 | MDKK-YSIGLDIGTNSVGWAVITDDYKVPSKKFKVLGNTDRHSIKKNLIGALLFDSGETA--EATRLKRTARRRYT | 73 |
| WP_038434062 | 1 | MDKK-YSIGLDIGTNSVGWAVITDDYKVPSKKFKVLGNTDRHSIKKNLIGALLFDSGETA--EATRLKRTARRRYT | 73 |
| BAQ51233 | | ---------------------------------------------------------------------------- | |
| KGE60162 | | ---------------------------------------------------------------------------- | |
| KGE60856 | | ---------------------------------------------------------------------------- | |
| WP_002989955 | 1 | MDKK-YSIGLDIGTNSVGWAVITDDYKVPSKKFKVLGNTDRHSIKKNLIGALLFDSGEIA--EATRLKRTARRRYT | 73 |
| WP_003030002 | 1 | MDQK-YSIGLDIGTNSVGWAVVTDDYKVPAKKMKVLGNTDKQSIKKNLLGALLFDSGETA--EATRLKRTARRRYT | 73 |
| WP_003065552 | 1 | MTKKnYSIGLDIGTNSVGWAVITDDYKVPAKKMKVLGNTDKKYIKKNLLGALLFDSGETA--EATRLKRTARRRYT | 74 |
| WP_001040076 | 1 | MNKP-YSIGLDIGTNSVGWSIITDDYKVPAKKIRVLGNTDKEYIKKNLIGALLFDGGNTA--ADRRLKRTARRRYT | 73 |
| WP_001040078 | 1 | MNKP-YSIGLDIGTNSVGWSIITDDYKVPAKKMRVLGNTDKEYIKKNLIGALLFDGGNTA--ADRRLKRTARRRYT | 73 |
| WP_001040080 | 1 | MNKP-YSIGLDIGTNSVGWSIITDDYKVPAKKMRVLGNTDKEYIKKNLIGALLFDGGNTA--ADRRLKRTARRRYT | 73 |
| WP_001040081 | 1 | MNKP-YSIGLDIGTNSVGWSIITDDYKVPAKKMRVLGNTDKEYIKKNLIGALLFDGGNTA--ADRRLKRTARRRYT | 73 |
| WP_001040083 | 1 | MNKP-YSIGLDIGTNSVGWSIITDDYKVPAKKMRVLGNTDKEYIKKNLIGALLFDGGNTA--ADRRLKRTARRRYT | 73 |
| WP_001040085 | 1 | MNKP-YSIGLDIGTNSVGWSIITDDYKVPAKKMRVLGNTDKEYIKKNLIGALLFDGGNTA--ADRRLKRTARRRYT | 73 |
| WP_001040087 | 1 | MNKP-YSIGLDIGTNSVGWSIITDDYKVPAKKMRVLGNTDKEYIKKNLIGALLFDGGNTA--ADRRLKRTARRRYT | 73 |
| WP_001040088 | 1 | MNKP-YSIGLDIGTNSVGWSIITDDYKVPAKKMRVLGNTDKEYIKKNLIGALLFDGGNTA--ADRRLKRTARRRYT | 73 |
| WP_001040089 | 1 | MNKP-YSIGLDIGTNSVGWSIITDDYKVPAKKMRVLGNTDKEYIKKNLIGALLFDGGNTA--ADRRLKRTARRRYT | 73 |
| WP_001040090 | 1 | MNKP-YSIGLDIGTNSVGWSIITDDYKVPAKKMRVLGNTDKEYIKKNLIGALLFDGGNTA--ADRRLKRTARRRYT | 73 |
| WP_001040091 | 1 | MNKP-YSIGLDIGTNSVGWSIITDDYKVPAKKMRVLGNTDKEYIKKNLIGALLFDGGNTA--ADRRLKRTARRRYT | 73 |
| WP_001040092 | 1 | MNKP-YSIGLDIGTNSVGWSIITDDYKVPAKKMRVLGNTDKEYIKKNLIGALLFDGGNTA--ADRRLKRTARRRYT | 73 |
| WP_001040094 | 1 | MNKP-YSIGLDIGTNSVGWSIITDDYKVPAKKMRVLGNTDKEYIKKNLIGALLFDGGNTA--ADRRLKRTARRRYT | 73 |
| WP_001040095 | 1 | MNKP-YSIGLDIGTNSVGWSIITDDYKVPAKKMRVLGNTDKEYIKKNLIGALLFDGGNTA--ADRRLKRTARRRYT | 73 |
| WP_001040096 | 1 | MNKP-YSIGLDIGTNSVGWSIITDDYKVPAKKMRVLGNTDKEYIKKNLIGALLFDGGNTA--ADRRLKRTARRRYT | 73 |
| WP_001040097 | 1 | MNKP-YSIGLDIGTNSVGWSIITDDYKVPAKKMRVLGNTDKEYIKKNLIGALLFDGGNTA--ADRRLKRTARRRYT | 73 |
| WP_001040098 | 1 | MNKP-YSIGLDIGTNSVGWSIITDDYKVPAKKMRVLGNTDKEYIKKNLIGALLFDGGNTA--ADRRLKRTARRRYT | 73 |
| WP_001040099 | 1 | MNKP-YSIGLDIGTNSVGWSIITDDYKVPAKKMRVLGNTDKEYIKKNLIGALLFDGGNTA--ADRRLKRTARRRYT | 73 |
| WP_001040100 | 1 | MNKP-YSIGLDIGTNSVGWSIITDDYKVPAKKMRVLGNTDKEYIKKNLIGALLFDGGNTA--ADRRLKRTARRRYT | 73 |
| WP_001040104 | 1 | MNKP-YSIGLDIGTNSVGWSIITDDYKVPAKKMRVLGNTDKEYIKKNLIGALLFDGGNTA--ADRRLKRTARRRYT | 73 |
| WP_001040105 | 1 | MNKP-YSIGLDIGTNSVGWSIITDDYKVPAKKMRVLGNTDKEYIKKNLIGALLFDGGNTA--ADRRLKRTSRRRYT | 73 |
| WP_001040106 | 1 | MNKP-YSIGLDIGTNSVGYSVVTDDYKVPAKKMRVLGNTDKEYIKKNLIGALLEDGGNTA--SDRRLKRTARRRYT | 73 |
| WP_001040107 | 1 | MNKP-YSIGLDIGTNSVGYSVVTDDYKVPAKKMRVLGNTDKEYIKKNLIGALLEDGGNTA--SDRRLKRTARRRYT | 73 |
| WP_001040108 | 1 | MNKP-YSIGLDIGTNSVGYSVVTDDYKVPAKKMRVLGNTDKEYIKKNLIGALLEDGGNTA--SDRRLKRTARRRYT | 73 |
| WP_001040109 | 1 | MNKP-YSIGLDIGTNSVGYSVVTDDYKVPAKKMRVLGNTDKEYIKKNLIGALLEDGGNTA--SDRRLKRTARRRYT | 73 |
| WP_001040110 | 1 | MNKP-YSIGLDIGTNSVGYSVVTDDYKVPAKKMRVLGNTDKEYIKKNLIGALLEDGGNTA--SDRRLKRTARRRYT | 73 |
| WP_015058523 | 1 | MNKP-YSIGLDIGTNSVGWSIITDDYKVPAKKMRVLGNTDKEYIKKNLIGALLFDGGNTA--ADRRLKRTARRRYT | 73 |
| WP_017643650 | 1 | MNKP-YSIGLDIGTNSVGWSIITDDYKVPAKKMRVLGNTDKEYIKKNLIGALLFDGGNTA--ADRRLKRTARRRYT | 73 |
| WP_017647151 | 1 | MNKP-YSIGLDIGTNSVGWSIITDDYKVPAKKMRVLGNTDKEYIKKNLIGALLFDGGNTA--SDRRLKRTARRRYT | 73 |
| WP_017648376 | 1 | MNKP-YSIGLDIGTNSVGWSIITDDYKVPAKKMRVLGNTDKEYIKKNLIGALLFDGGNTA--SDRRLKRTARRRYT | 73 |
| WP_017649527 | 1 | MNKP-YSIGLDIGTNSVGWSIITDDYKVPAKKMRVLGNTDKEYIKKNLIGALLFDGGNTA--ADRRLKRTARRRYT | 73 |
| WP_017771611 | 1 | MNKP-YSIGLDIGTNSVGYSVVTDDYKVPAKKMRVLGNTDKEYIKKNLIGALLFDGGNTA--SDRRLKRTARRRYT | 73 |
| WP_017771984 | 1 | MNKP-YSIGLDIGTNSVGWSIITDDYKVPAKKMRVLGNTDKEYIKKNLIGALLFDGGNTA--ADRRLKRTARRRYT | 73 |
| CFQ25032 | 1 | MNKP-YSIGLDIGTNSVGWSIITDDYKVPAKKMRVLGNTDKEYIKKNLIGALLFDGGNTA--ADRRLKRTARRRYT | 73 |
| CFV16040 | 1 | MNKP-YSIGLDIGTNSVGWSIITDDYKVPAKKMRVLGNTDKEYIKKNLIGALLFDGGNTA--ADRRLKRTARRRYT | 73 |
| KLJ37842 | 1 | MNKP-YSIGLDIGTNSVGWSIITDDYKVPAKKMRVLGNTDKEYIKKNLIGALLFDGGNTA--ADRRLKRTARRRYT | 73 |
| KLJ72361 | 1 | MNKP-YSIGLDIGTNSVGWSIITDDYKVPAKKMRVLGNTDKEYIKKNLIGALLFDGGNTA--ADRRLKRTARRRYT | 73 |
| KLL20707 | 1 | MNKP-YSIGLDIGTNSVGWSIITDDYKVPAKKMRVLGNTDKEYIKKNLIGALLFDGGNTA--ADRRLKRTARRRYT | 73 |
| KLL42645 | 1 | MNKP-YSIGLDIGTNSVGYSVVTDDYKVPAKKMRVLGNTDKEYIKKNLIGALLFDGGNTA--SDRRLKRTARRRYT | 73 |
| WP_047207273 | 1 | MNKP-YSIGLDIGTNSVGWSIITDDYKVPAKKMRVLGNTDKEYIKKNLIGALLFDGRNTA--ADRRLKRTARRRYT | 73 |
| WP_047209694 | 1 | MNKP-YSIGLDIGTNSVGWSIITDDYKVPAKKMRVLGNTDKEYIKKNLIGALLFDGGNTA--ADRRLKRTARRRYT | 73 |
| WP_050198062 | 1 | MNKP-YSIGLDIGTNSVGWSIITDDYKVPAKKMRVLGNTDKEYIKKNLIGALLFDGGNTA--ADRRLKRTARRRYT | 73 |
| WP_050201642 | 1 | MNKP-YSIGLDIGTNSVGWSIITDDYKVPAKKMRVLGNTDKEYIKKNLIGALLFDGGNTA--ADRRLKRTARRRYT | 73 |
| WP_050204027 | 1 | MNKP-YSIGLDIGTNSVGYSVVTDDYKVPAKKMRVLGNTDKEYIKKNLIGALLFDGGNTA--SDRRLKRTARRRYT | 73 |
| WP_050881965 | 1 | MNKP-YSIGLDIGTNSVGWSIITDDYKVPAKKMRVLGNTDKEYIKKNLIGALLFDGGNTA--ADRRLKRTARRRYT | 73 |
| WP_050886065 | 1 | MNKP-YSIGLDIGTNSVGWSIITDDYKVPAKKMRVLGNTDKEYIKKNLIGALLFDGGNTA--ADRRLKRTARRRYT | 73 |
| AHN30376 | 1 | MNKP-YSIGLDIGTNSVGWSIITDDYKVPAKKMRVLGNTDKEYIKKNLIGALLFDGGNTA--ADRRLKRTARRRYT | 73 |
| EAO78426 | 1 | MNKP-YSIGXDIGTNSVGWSIITDDYKVPAKKMRVLGNTDKEYIKKNLIGALLFDGGNTA--ADRRLKRTARRRYT | 73 |
| CCW42055 | 1 | MNKP-YSIGLDIGTNSVGWSIITDDYKVPAKKMRVLGNTDKEYIKKNLIGALLFDGGNTA--ADRRLKRIARRRYT | 73 |
| WP_003041502 | 1 | MNQK-YSIGLDIGTNSVGWAVITDDYKVPAKKMKVLGNTDKQSIKKNLLGALLFDSGETA--EATRLKRTARRRYT | 73 |
| WP_037593752 | 1 | MKKE-YSIGLDIGTNSVGWAVITDDYKVPAKKMKVLGNTDKQSIKKNLLGALLFDSGETA--EATRLKRTARRRYT | 74 |
| WP_049516684 | 1 | MKKE-YSIGLDIGTNSVGWAVITDDYKVPAKKMKVLGNTDKQSIKKNLLGALLFDSGETA--EATRLKRTARRRYT | 74 |
| GAD46167 | 1 | MKKE-YSIGLDIGTNSVGWAVITDDYKVPAKKMKVLGNTDKQSIKKNLLGALLFDSGETA--EATRLKRTARRRYT | 73 |
| WP_018363470 | 1 | MTKKnYSIGLDIGTNSVGWAVITDDYKVPAKKMKVLGNTDKKYIKKNLLGALLFDSGETA--EATRLKRTARRRYT | 74 |
| WP_003043819 | 1 | MEKK-YSIGLDIGTNSVGWAVITDDYKVPSKKFKVLGNTNRKSIKKNLMGALLFDSGETA--EATRLKRTARRRYT | 73 |
| WP_006269658 | 1 | MGKP-YSIGLDIGTNSVGWAVVTDDYKVPAKKMKVLGNTDKQSIKKNLLGALLFDSGETA--EATRLKRTARRRYT | 73 |
| WP_048800889 | 1 | MTQK-YSIGLDIGTNSVGWAIVTDDYKVPAKKMKILGNTNKQYIKKNLLGALLFDSGETA--KATRLKRTARRRYT | 73 |
| WP_012767106 | 1 | MDKK-YSIGLDIGTNSVGWAVITDDYKVPSKKFKVLGNTDRHSIKKNLIGALLFDSGETA--EATRLKRTARRRYT | 73 |
| WP_014612333 | 1 | MDKK-YSIGLDIGTNSVGWAVITDDYKVPSKKFKVLGNTDRHSIKKNLIGALLFDSGETA--EATRLKRTARRRYT | 73 |
| WP_015017095 | 1 | MDKK-YSIGLDIGTNSVGWAVITDDYKVPSKKFKVLGNTDRHSIKKNLIGALLFDSGETA--EATRLKRTARRRYT | 73 |
| WP_015057649 | 1 | MDKK-YSIGLDIGTNSVGWAVITDDYKVPSKKFKVLGNTDRHSIKKNLIGALLFDSGETA--EATRLKRTARRRYT | 73 |
| WP_048327215 | 1 | MDKK-YSIGLDIGTNSVGWAVITDDYKVPSKKFKVLGNTDRHSIKKNLIGALLFDSGETA--EATRLKRTARRRYT | 73 |
| WP_049519324 | 1 | MDKK-YSIGLDIGTNSVGWAVITDDYKVPSKKFKVLGNTDRHSIKKNLIGALLFDSGETA--EATRLKRTARRRYT | 73 |
| WP_012515931 | 1 | MKKP-YTIALDIGTNSVGWVVVTDDYRVPTKKMKVLGNTERKTIKKNLIGALLFDSGDTA--EGTRLKRTARRRYT | 73 |
| WP_021320964 | 1 | MKKP-YTIALDIGTNSVGWVVVTDDYRVPTKKMKVLGNTERKTIKKNLIGALLFDSGDTA--EGTRLKRTARRRYT | 73 |
| WP_037581760 | 1 | MKKP-YTIALDIGTNSVGWVVVTDDYRVPTKKMKVLGNTERKTIKKNLIGALLFDSGDTA--EGTRLKRTARPRYT | 73 |
| WP_004232481 | 1 | M-EKtYSIGLDIGTNSVGWAVITDDYKVPAKKMKVLGNTDKKYIKKNLLGALLFDSGETA--EATRLKRAARRRYT | 73 |
| WP_009854540 | 1 | MTKKnYSIGLDIGTNSVGWAVITDDYKVPAKKMKVLGNTDKKYIKKNLLGALLFDSGETA--EATRLKRTARRRYT | 74 |
| WP_012962174 | 1 | MTEKnYSIGLDIGTNSVGWAVITDDYKVPAKKMKVLGNTDKKYIKKNLLGALLFDNGETA--EATRLKRTARRRYT | 74 |
| WP_039695303 | 1 | MTKKnYSIGLDIGTNSVGWAVITDDYKVPAKKMKVLGNTDKKYIKKNLLGALLFDSGETA--EATRLKRTARRRYT | 74 |
| WP_014334983 | 1 | M-EKsYSIGLDIGTNSVGWAVITDDYKVPAKKMKVLGNTDKKYIKKNLLGALLFDSGETA--EVTRLKRTARRRYT | 73 |
| WP_003099269 | 1 | MRKP-YSIGLDIGTNSVGWAVITDDYKVPSKKMRIQGTTDRTSIKKNLIGALLFDNGETA--EATRLKRTTRRRYT | 73 |
| AHY15608 | 1 | MRKP-YSIGLDIGTNSVGWAVITDDYKVPSKKMRIQGTTDRTSIKKNLIGALLFDNGETA--EATRLKRTTRRRYT | 73 |
| AHY17476 | 1 | MRKP-YSIGLDIGTNSVGWAVITDDYKVPSKKMRIQGTTDRTSIKKNLIGALLFDNGETA--EATRLKRTTRRRYT | 73 |
| ESR09100 | | ---------------------------------------------------------------------------- | |
| AGM98575 | 1 | MRKP-YSIGLDIGTNSVGWAVITDDYKVPSKKMRIQGTTDRTSIKKNLIGALLFDNGETA--EATRLKRTTRRRYT | 73 |
| ALF27331 | 1 | MKKP-YSIGLDIGTNSVGWAVVTDDYKVPAKKMKVLGNTDKSHIKKNLLGALLFDSGNTA--EDRRLKRTARRRYT | 73 |
| WP_018372492 | 1 | MKKP-YSIGLDIGTNSVGWAVVMEDYKVPSKKMKVLGNTDKQSIKKNLIGALLFDSGETAv--ERRLNRTTSRRYD | 73 |
| WP_045618028 | 1 | NNKP-YSIGLDIGTNSVGWAVITDDYKVPSKKMKVLGNTDKHFIKKNLLGALLFDEGTTA--EDRRLKRTARRRYT | 74 |
| WP_045635197 | 1 | K-KG-YSIGLDIGTNSVGFAVITDDYKVPSKKMKVLGNTDKRFIKKNLIGALLFDEGTTA--EARRLKRTARRRYT | 73 |
| WP_002263549 | 1 | MKKP-YSIGLDIGTNSVGWAVVTDDYKVPAKKMKVLGNTDKSHIEKNLLGALLFDSGNTA--EDRRLKRTARRRYT | 73 |
| WP_002263887 | 1 | MKKP-YSIGLDIGTNSVGWAVVTDDYKVPAKKMKVLGNTDKSHIEKNLLGALLFDSGNTA--EDRRLKRTARRRYT | 73 |
| WP_002264920 | 1 | MKKP-YSIGLDIGTNSVGWAVVTDDYKVPAKKMKVLGNTDKSHIKKNLLGALLFDSGNTA--EDRRLKRTARRRYT | 73 |
| WP_002269043 | 1 | MKKP-YSIGLDIGTNSVGWAVVTDDYKVPAKKMKVLGNTDKSHIKKNLLGALLFDSGNTA--EDRRLKRTARRRYT | 73 |
| WP_002269448 | 1 | MKKP-YSIGLDIGTNSVGWAVVTDDYKVPAKKMKVLGNTDKSHIKKNLLGALLFDSGNTA--EDRRLKRTARRRYT | 73 |
| WP_002271977 | 1 | MKKP-YSIGLDIGTNSVGWAVVTDDYKVPAKKMKVLGNTDKSHIKKNLLGALLFDSGNTA--EDRRLKRTARRRYT | 73 |
| WP_002272766 | 1 | MKKP-YSIGLDIGTNSVGWAVVTDDYKVPAKKMKVLGNTDKSHIKKNLLGALLFDSGNTA--EDRRLKRTARRRYT | 73 |
| WP_002273241 | 1 | MKKP-YSIGLDIGTNSVGWAVVTDDYKVPAKKMKVLGNTDKSHIKKNLLGALLFDSGNTA--EDRRLKRTARRRYT | 73 |
| WP_002275430 | 1 | MKKP-YSIGLDIGTNSVGWAVVTDDYKVPAKKMKVLGNTDKSHIKKNLLGALLFDSGNTA--ADRRLKRTARRRYT | 73 |
| WP_002276448 | 1 | MKKP-YSIGLDIGTNSVGWAVVTDDYKVPAKKMKVLGNTDKSHIKKNLLGALLFDSGNTA--EDRRLKRTARRRYT | 73 |
| WP_002277050 | 1 | MKKS-YSIGLDIGTNSVGWAVVTDDYKVPAKKMKVLGNTDKSHIKKNLLGALLFDSGNTA--EDRRLKRTARRRYT | 73 |
| WP_002277364 | 1 | MKKP-YSIGLDIGTNSVGWAVVTDDYKVPAKKMKVLGNTDKSHIKKNLLGALLFDSGNTA--ADRRLKRTARRRYT | 73 |
| WP_002279025 | 1 | MKKP-YSIGLDIGTNSVGWAVVTDDYKVPAKKMKVLGNTDKSHIEKNLLGALLFDSGNTA--EDRRLKRTARRRYT | 73 |
| WP_002279859 | 1 | MKKP-YSIGLDIGTNSVGWAVVTDDYKVPAKKMKVLGNTDKSHIKKNLLGALLFDSGNTA--EDRRLKRTARRRYT | 73 |
| WP_002280230 | 1 | MKKP-YSIGLDIGTNSVGWAVVTDDYKVPAKKMKVLGNTDKSHIKKNLLGALLFDSGNTA--ADRRLKRTARRRYT | 73 |
| WP_002281696 | 1 | MKKP-YSIGLDIGTNSVGWAVVTDDYKVPAKKMKVLGNTDKSHIKKNLLGALLFDSGNTA--ADRRLKRTARRRYT | 73 |
| WP_002282247 | 1 | MKKP-YSIGLDIGTNSVGWAVVTDDYKVPAKKMKVLGNTDKSHIKKNLLGALLFDSGNTA--EDRRLKRTARRRYT | 73 |
| WP_002282906 | 1 | MKKP-YSIGLDIGTNSVGWSVVTDDYKVPAKKMKVLGNTDKSHIEKNLLGALLFDSGNTA--EDRRLKRTARRRYT | 73 |
| WP_002283846 | 1 | MKKP-YSIGLDIGTNSVGWAVVTDDYKVPAKKMKVLGNTDKSHIKKNLLGALLFDSGNTA--EDRRLKRTARRRYT | 73 |
| WP_002287255 | 1 | MKKP-YSIGLDIGTNSVGWAVVTDDYKVSAKKMKVLGNTDKSHIKKNLLGALLFDSGNTA--EDRRLKRTARRRYT | 73 |
| WP_002288990 | 1 | MKKP-YSIGLDIGTNSVGWAVVTDDYKVPAKKMKVLGNTDKSHIKKNLLGALLFDSGNTA--EDRRLKRTARRRYT | 73 |
| WP_002289641 | 1 | MKKP-YSIGLDIGTNSVGWAVVTDDYKVPAKKMKVLGNTDKSHIKKNLLGALLFDSGNTA--EDRRLKRTTRRRYT | 73 |
| WP_002290427 | 1 | MKKP-YSIGLDIGTNSVGWAVVTDDYKVPAKKMKVLGNTDKSHIKKNLLGALLFDSGNTA--EDRRLKRTARRRYT | 73 |
| WP_002295753 | 1 | MKKP-YSIGLDIGTNSVGWAVVTDDYKVPAKKMKVLGNTDKSHIKKNLLGALLFDSGNTA--EDRRLKRTARRRYT | 73 |
| WP_002296423 | 1 | MKKP-YSIGLDIGTNSVGWAVVTDDYKVPAKKMKVLGNTDKSHIKKNLLGALLFDSGNTA--EDRRLKRTARRRYT | 73 |
| WP_002304487 | 1 | MKKP-YSIGLDIGTNSVGWAVVTDDYKVPAKKMKVLGNTDKSHIKKNLLGALLFDSGNTA--EDRRLKRTARRRYT | 73 |
| WP_002305844 | 1 | MKKP-YSIGLDIGTNSVGWAVVTDDYKVPAKKMKVLGNTDKSHIKKNLLGALLFDSGNTA--EDRRLKRTARRRYT | 73 |
| WP_002307203 | 1 | MKKP-YSIGLDIGTNSVGWAVVTDDYKVPAKKMKVLGNTDKSHIKKNLLGALLFDSGNTA--EDRRLKRTARRRYT | 73 |
| WP_002310390 | 1 | MKKP-YSIGLDIGTNSVGWAVVTDDYKVPAKKMKVLGNTDKSHIKKNLLGALLFDSGNTA--EDRRLKRTARRRYT | 73 |
| WP_002352408 | 1 | MKKP-YSIGLDIGTNSVGWAVVTDDYKVPAKKMKVLGNTDKSHIKKNLLGALLFDSGNTA--EDRRLKRTARRRYT | 73 |
| WP_012997688 | 1 | MKKP-YSIGLDIGTNSVGWAVVTDDYKVPAKKMKVLGNTDKSHIKKNLLGALLFDSGNTA--ADRRLKRTARRRYT | 73 |
| WP_014677909 | 1 | MKKP-YSIGLDIGTNSVGWAVVTDDYKVPDKKMKVLGNTDKSHIKKNLLGALLFDSGNTA--EDRRLKRTARRRYT | 73 |
| WP_019312892 | 1 | MKKP-YSIGLDIGTNSVGWAVVTDDYKVPAKKMKVLGNTDKSHIKKNLLGALLFDSGNTA--ADRRLKRTARRRYT | 73 |
| WP_019313659 | 1 | MKKP-YSIGLDIGTNSVGWAVVTDDYKVPAKKMKVLGNTDKSHIEKNLLGALLFDSGNTA--EDRRLKRTARRRYT | 73 |
| WP_019314093 | 1 | MKKP-YSIGLDIGTNSVGWAVVTDDYKVPAKKMKVLGNTDKSHIKKNLLGALLFDSGNTA--EDRRLKRTARRRYT | 73 |
| WP_019315370 | 1 | MKKP-YSIGLDIGTNSVGWAVVTDDYKVPAKKMKVLGNTDKSHIKKNLLGALLFDSGNTA--EDRRLKRTARRRYT | 73 |
| WP_019803776 | 1 | MKKP-YSIGLDIGTNSVGWAVVTDDYKVPAKKMKVLGNTDKSHIEKNLLGALLFDSGNTA--EDRRLKRTARRRYT | 73 |
| WP_019805234 | 1 | MKKP-YSIGLDIGTNSVGWAVVTDDYKVPAKKMKVLGNTDKSHIKKNLLGALLFDSGNTA--EDRRLKRTARRRYT | 73 |
| WP_024783594 | 1 | MKKP-YSIGLDIGTNSVGWAVVTDDYKVPAKKMKVLGNTDKSHIEKNLLGALLFDSGNTA--EDRRLKRTARRRYT | 73 |
| WP_024784288 | 1 | MKKP-YSIGLDIGTNSVGWAVVTDDYKVPAKKMKVLGNTDKSHIKKNLLGALLFDSGNTA--EDRRLKRTARRRYT | 73 |
| WP_024784666 | 1 | MKKP-YSIGLDIGTNSVGWAVVTDDYKVPAKKMKVLGNTDKSHIKKNLLGALLFDSGNTA--ADRRLKRTARRRYT | 73 |
| WP_024784894 | 1 | MKKP-YSIGLDIGTNSVGWAVVTDDYKVPAKKMKVLGNTDKSHIKKNLLGALLFDSGNTA--EDRRLKRTTRRRYT | 73 |
| WP_024786433 | 1 | MKKP-YSIGLDIGTNSVGWAVVTDDYKVPAKKMKVLGNTDKSHIKKNLLGALLFDSGNTA--ADRRLKRTARRRYT | 73 |
| WP_049473442 | 1 | MKKP-YSIGLDIGTNSVGWAVVTDDYKVPAKKMKVLGNTDKSHIKKNLLGALLFDSGNTA--ADRRLKRTARRRYT | 73 |
| WP_049474547 | 1 | MKKP-YSIGLDIGTNSVGWAVVTDDYKVPAKKMKVLGNTDKSHIKKNLLGALLFDSGNTA--EDRRLKRTTRRRYT | 73 |
| EMC03581 | 1 | MDL--------IGTNSVGWAVVTDDYKVPAKKMKVLGNTDKSHIKKNLLGALLFDSGNTA--ADRRLKRTARRRYT | 66 |
| WP_000428612 | 1 | ENKN-YSIGLDIGTNSVGWAVITDDYKVPSKKMKVLGNTDKRFIKKNLIGALLFDEGTTA--EARRLKRTARRRYT | 74 |
| WP_000428613 | 1 | ENKN-YSIGLDIGTNSVGWSVITDDYKVPSKKMKVLGNTDKRFIKKNLIGALLFDEGTTA--EARRLKRTARRRYT | 74 |
| WP_049523028 | 1 | K-KP-YSIGLDIGTNSVGWAVITDDYKVPAKKMKVLGNTNKESIKKNLIGALLFDAGNTA--ADRRLKRTARRRYT | 73 |
| WP_003107102 | 1 | --------------------------------MKVLGNTDRQTVKKNMIGTLLFDSGETA--EARRLKRTARRRYT | 42 |
| WP_054279288 | 1 | -KKS-YSIGLDIGTNSVGWAVITDDYKVPAKKMKVLGNTSRQSIKKNMIGALLFDEGGPA--ASTRVKRTTRRRYT | 75 |
| WP_049531101 | 1 | SNKP-YSIGLDIGTNSVGWAVITDDYKVPSKKMKVLGNTDKHFIKKNLIGALLFDEGTTA--EDRRLKRTARRRYT | 74 |
| WP_049538452 | 1 | SNKP-YSIGLDIGTNSVGWVIITDDYKVPSKKMKVLGNTDKHFIKKNLIGALLFDEGTTA--EDRRLKRTARRRYT | 74 |
| WP_049549711 | 1 | SNKP-YSIGLDIGTNSVGWAVITDDYKVPSKKMTVLGNTDKHFIKKNLIGALLFDEGTTA--EDRRLKRTARRRYT | 74 |
| WP_007896501 | 1 | --YS-YSIGLDIGTNSVGWAVINEDYKVPAKKMTVFGNTDRKTIKKNLLGTVLFDSGETA--QARRLKRTNRRRYT | 75 |
| EFR44625 | 1 | -----------------------------------------------MLGTVLFDSGETA--QARRLKRTNRRRYT | 27 |
| WP_002897477 | 1 | K-KP-YSIGLDIGTNSVGWAVVTDDYKVPAKKMRVFGDTDRSHIKKNLLGTLLFDDGNTA--ESRRLKRTARRRYT | 73 |
| WP_002906454 | 1 | K-KP-YSIGLDIGTNSVGWAVITDDYKVPSKKMKVLGNTDKHFIKKNLIGALLFDEGTTA--EDRRLKRTSRRRYT | 73 |
| WP_009729476 | 1 | ENKN-YSIGLDIGTNSVGWSVITDDYKVPSKKMKVLGNTDKHFIKKNLIGALLFDEGTTA--EARRLKRTARRRYT | 74 |
| CQR24647 | 1 | MKKP-YSIGLDIGTNSVGWSVVTDDYKVPAKKMKVLGNTDKEYIKKNLIGALLFDSGETA--EATRMKRTARRRYT | 73 |
| WP_000066813 | 1 | SNKS-YSIGLDIGTNSVGWAVITDDYKVPSKKMKVLGNTDKHFIKKNLIGALLFDEGTTA--EDRRLKRTARRRYT | 74 |
| WP_009754323 | 1 | NNNN-YSIGLDIGTNSVGWAVITDDYKVPSKKMRVLGNTDKRFIKKNLIGALLFDEGTTA--EDRRLKRTARRRYT | 74 |
| WP_044674937 | 1 | MKKK-YAIGIDIGTNSVGWSVVTDDYKVPSKKMKVFGNTEKRYIKKNLLGTLLFDEGNTA--ENRRLKRTARRRYT | 73 |
| WP_044676715 | 1 | MKKK-YAIGIDIGTNSVGWSVVTDDYKVPSKKMKVFGNTEKRYIKKNLLGTLLFDEGNTA--ENRRLKRTARRRYT | 73 |
| WP_044680361 | 1 | MKKK-YAIGIDIGTNSVGWSVVTDDYKVPSKKMKVFGNTEKRYIKKNLLGTLLFDEGNTA--ENRRLKRTARRRYT | 73 |
| WP_044681799 | 1 | MKKK-YAIGIDIGTNSVGWSVVTDDYKVPSKKMKVFGNTEKRYIKKNLLGTLLFDEGNTA--ENRRLKRTARRRYT | 73 |
| WP_049533112 | 1 | MDQK-YSIGLDIGTNSVGWAVVTDDYKVPAKKMKVLGNTDKQSIKKNLLGALLFDSGETA--EATRLKRTARRRYT | 73 |
| WP_029090905 | 1 | -----------------------------------------------MWGVSLFEAGKTA--AERRGYRSTRRRLN | 27 |
| WP_006506696 | 1 | I-VD-YCIGLDLGTGSVGWAVVDMNHRLMKRN------------GKHLWGSRLFSNAETA--ANRRASRSIRRRYN | 60 |
| AIT42264 | 1 | MDKK-YSIGLDIGTNSVGWAVITDEYKVPSKKFKVLGNTDRHSIKKNLIGALLFDSGETA--EATRLKRTARRRYT | 73 |
| WP_034440723 | 1 | -MKN-YTIGLDIGTNSVGWAVIKDDLTLVRKKIKISGNTDKKEVKKNLWGSFLFEQGDTA--QDTRVKRIARRRYE | 72 |
| AKQ21048 | 1 | MDKK-YSIGLDIGTNSVGWAVITDEYKVPSKKFKVLGNTDRHSIKKNLIGALLFDSGETA--EATRLKRTARRRYT | 73 |
| WP_004636532 | 1 | MQKN-YTIGLDIGTNSVGWAVMKDDYTLIRKRMKVLGNTDIKKIKKNFWGVRLFDEGETA--KETRLKRGTRRRYQ | 73 |
| WP_002364836 | 1 | MKKD-YVIGLDIGTNSVGWAVMTEDYQLVKKKMPIYGNTEKKKIKKNFWGVRLFEEGHTA--EDRRLKRTARRRIS | 73 |
| WP_016631044 | 1 | --------------------------------------------------MRLFEEGHTA--EDRRLKRTARRRIS | 24 |
| EMS75795 | | ---------------------------------------------------------------------------- | |
| WP_002373311 | 1 | MKKD-YVIGLDIGTNSVGWAVMTEDYQLVKKKMPIYGNTEKKKIKKNFWGVRLFEEGHTA--EDRRLKRTARRRIS | 73 |
| WP_002378009 | 1 | MKKD-YVIGLDIGTNSVGWAVMTEDYQLVKKKMPIYGNTEKKKIKKNFWGVRLFEEGHTA--EDRRLKRTARRRIS | 73 |
| WP_002407324 | 1 | MKKD-YVIGLDIGTNSVGWAVMTEDYQLVKKKMPIYGNTEKKKIKKNFWGVRLFEEGHTA--EDRRLKRTARRRIS | 73 |
| WP_002413717 | 1 | MKKD-YVIGLDIGTNSVGWAVMTEDYQLVKKKMPIYGNTEKKKIKKNFWGVRLFEEGHTA--EDRRLKRTARRRIS | 73 |
| WP_010775580 | 1 | MKKD-YVIGLDIGTNSVGWAVMTEDYQLVKKKMPIYGNTEKKKIKKNFWGVRLFEEGHTA--EDRRLKRTARRRIS | 73 |
| WP_010818269 | 1 | MKKD-YVIGLDIGTNSVGWAVMTEDYQLVKKKMPIYGNTEKKKIKKNFWGVRLFEEGHTA--EDRRLKRTARRRIS | 73 |
| WP_010824395 | 1 | MKKD-YVIGLDIGSNSVGWAVMTEDYQLVKKKMPIYGNTEKKKIKKNFWGVRLFEEGHTA--EDRRLKRTARRRIS | 73 |
| WP_016622645 | 1 | MKKD-YVIGLDIGTNSVGWAVMTEDYQLVKKKMPIYGNTEKKKIKKNFWGVRLFEEGHTA--EDRRLKRTARRRIS | 73 |
| WP_033624816 | 1 | MKKD-YVIGLDIGTNSVGWAVMTEDYQLVKKKMPIYGNTEKKKIKKNFWGVRLFEEGHTA--EDRRLKRTARRRIS | 73 |
| WP_033625576 | 1 | MKKD-YVIGLDIGTNSVGWAVMTEDYQLVKKKMPIYGNTEKKKIKKNFWGVRLFEEGHTA--EDRRLKRTARRRIS | 73 |
| WP_033789179 | 1 | MKKD-YVIGLDIGTNSVGWAVMTEDYQLVKKKMPIYGNTEKKKIKKNFWGVRLFEEGHTA--EDRRLKRTARRRIS | 73 |
| WP_002310644 | 1 | MKKE-YTIGLDIGTNSVGWSVLTDDYRLVSKKMKVAGNTEKSSTKKNFWGVRLFDEGQTA--EARRSKRTARRRLA | 73 |
| WP_002312694 | 1 | MKKE-YTIGLDIGTNSVGWSVLTDDYRLVSKKMKVAGNTEKSSTKKNFWGVRLFDEGQTA--EARRSKRTARRRLA | 73 |
| WP_002314015 | 1 | MKKE-YTIGLDIGTNSVGWSVLTDDYRLVSKKMKVAGNTEKSSTKKNFWGVRLFDEGQTA--EARRSKRTARRRLA | 73 |
| WP_002320716 | 1 | MKKE-YTIGLDIGTNSVGWSVLTDDYRLVSKKMKVAGNTEKSSTKKNFWGVRLFDEGQTA--EARRSKRTARRRLA | 73 |
| WP_002330729 | 1 | MKKE-YTIGLDIGTNSVGWSVLTDDYRLVSKKMKVAGNTEKSSTKKNFWGVRLFDEGQTA--EARRSKRTARRRLA | 73 |
| WP_002335161 | 1 | MKKE-YTIGLDIGTNSVGWSVLTDDYRLVSKKMKVAGNTEKSSTKKNFWGVRLFDEGQTA--EARRSKRTARRRLA | 73 |
| WP_002345439 | 1 | MKKE-YTIGLDIGTNSVGWSVLTDDYRLVSKKMKVAGNTEKSSTKKNFWGVRLFDEGQTA--EARRSKRTARRRLA | 73 |
| WP_034867970 | 1 | MTKD-YTIGLDIGTNSVGWAVLTDDYQLMKRKMSVHGNTEKKKIKKNFWGARLFDEGQTA--EFRRTKRTNRRRLA | 73 |
| WP_047937432 | 1 | MKKE-YTIGLDIGTNSVGWSVLTDDYRLVSKKMKVAGNTEKSSTKKNFWGVRLFDEGQTA--EARRSKRTARRRLA | 73 |
| WP_010720994 | 1 | MTKD-YTIGLDIGTNSVGWAVLTDDYQLMKRKMSVHGNTEKKKIKKNFWGARLFDEGQTA--EFRRTKRTNRRRLA | 73 |
| WP_010737004 | 1 | MTKD-YTIGLDIGTNSVGWAVLTDDYQLMKRKMSVHGNTEKKKIKKNFWGARLFDEGQTA--EFRRTKRTNRRRLA | 73 |
| WP_034700478 | 1 | MTKD-YTIGLDIGTNSVGWAVLTDDYQLMKRKMSVHGNTEKKKIKKNFWGARLFDEGQTA--EFRRTKRTNRRRLA | 73 |
| WP_007209003 | 1 | MKND-YTIGLDIGTNSVGYSVVTDDYKVISKKMNVFGNTEKKSIKKNFWGVRLFESGQTA--QEARMKRTSRRRIA | 73 |
| WP_023519017 | 1 | MEKE-YTIGLDIGTNSVGWAVLTDDYRLVARKMSIQGDSNRKKIKKNFWGARLFEEGKTA--QFRRIKRTNRRRIA | 73 |
| WP_010770040 | 1 | MKKE-YTIGLDIGTNSVGWAVLTENYDLVKKKMKVYGNTETKYLKKNLWGVRLFDEGETA--ADRRLKRTTRRRYS | 73 |
| WP_048604708 | 1 | MGKE-YTIGLDIGTNSVGWAVLQEDLDLVRRKMKVYGNTEKNYLKKNFWGVDLFDEGMTA--KDTRLKRTTRRRYF | 73 |
| WP_010750235 | 1 | MNKA-YTLGLDIGTNSVGWAVVTDDYRLMAKKMPVHSKMEKKKIKKNFWGARLFDEGQTA--EERRNKRATRRRLR | 73 |
| AII16583 | 1 | ADKK-YSIGLDIGTNSVGWAVITDEYKVPSKKFKVLGNTDRHSIKKNLIGALLFDSGETA--EATRLKRTARRRYT | 112 |
| WP_029073316 | 1 | NNKI-YNIGLDIGDASVGWAVVDEHYNLLKRH------------GKHMWGSRLFTQANTA--VERRSSRSTRRRYN | 65 |
| WP_031589969 | 1 | NNKI-YNIGLDIGDASVGWAVVDEHYNLLKRH------------GKHMWGSRLFTQANTA--VERRSSRSTRRRYN | 65 |
| KDA45870 | 1 | LKKD-YSIGLDIGTNSVGHAVVTDDYKVPTKKMKVFGDTSKKTIKKNMLGVLLFNEGQTA--ADTRLKRGARRRYT | 74 |
| WP_039099354 | 1 | MSRP-YNIGLDIGTSSIGWSVVDDQSKLVSVR------------GKYGYGVRLYDEGQTA--AERRSFRTTRRRLK | 61 |
| AKP02966 | 1 | KEQP-YNIGLDIGTGSVGWAVTNDNYDLLNIK------------KKNLWGVRLFEGAQTA--KETRLNRSTRRRYR | 64 |
| WP_010991369 | 1 | MKKP-YTIGLDIGTNSVGWAVLTDQYDLVKRKMKIAGDSEKKQIKKNFWGVRLFDEGQTA--ADRRMARTARRRIE | 73 |
| WP_033838504 | 1 | MKKP-YTIGLDIGTNSVGWAVLTDQYDLVKRKMKIAGDSEKKQIKKNFWGVRLFDEGQTA--ADRRMARTARRRIE | 73 |
| EHN60060 | 1 | MKKP-YTIGLDIGTNSVGWAVLTDQYDLVKRKMKIAGDSEKKQIKKNFWGVRLFDEGQTA--ADRRMARTARRRIE | 76 |
| EFR89594 | | ---------------------------------------------------------------------------- | |
| WP_038409211 | 1 | MRKP-YTIGLDIGTNSVGWAVLTDQYNLVKRKMKVAGSAEKKQIKKNFWGVRLFDEGEVA--AGRRMNRTTRRRIE | 73 |
| EFR95520 | | ---------------------------------------------------------------------------- | |
| WP_003723650 | 1 | MKNP-YTIGLDIGTNSVGWAVLTNQYDLVKRKMKVAGNSDKKQIKKNFWGVRLFDDGQTA--VDRRMNRTARRRIE | 73 |
| WP_003727705 | 1 | MKNP-YTIGLDIGTNSVGWAVLTDQYDLVKRKMKVAGNSDKKQIKKNFWGVRLFDDGQTA--VDRRMNRTARRRIE | 73 |
| WP_003730785 | 1 | MKNP-YTIGLDIGTNSVGWAVLTDQYDLVKRKMKVAGNSDKKQIKKNFWGVRLFDDGQTA--VDRRMNRTARRRIE | 73 |
| WP_003733029 | 1 | MKKP-YTIGLDIGTNSVGWAVLTDQYDLVKRKMKISGDSEKKQIKKNFWGVRLFEKGETA--AKRRMSRTARRRIE | 73 |
| WP_003739838 | 1 | MKNP-YTIGLDIGTNSVGWAVLTDQYDLVKRKMKVAGNSDKKQIKKNFWGVRLFDEGETA--ADRRMNRTARRRIE | 73 |
| WP_014601172 | 1 | MKNP-YTIGLDIGTNSVGWAVLTNQYDLVKRKMKVAGNSDKKQIKKNFWGVRLFDDGQTA--VDRRMNRTARRRIE | 73 |
| WP_023548323 | 1 | MKNP-YTIGLDIGTNSVGWAVLTNQYDLVKRKMKVAGNSDKKQIKKNFWGVRLFDDGQTA--VDRRMNRTARRRIE | 73 |
| WP_031665337 | 1 | MKNP-YTIGLDIGTNSVGWAVLTDQYDLVKRKMKVAGNSDKKQIKKNFWGVRLFDDGQTA--VDRRMNRTARRRIE | 73 |
| WP_031669209 | 1 | MKKP-YTIGLDIGTNSVGWAVLTDQYDLVKRKMKISGDSEKKQIKKNFWGVRLFEKGETA--AKRRMSRTARRRIE | 73 |
| WP_033920898 | 1 | MKNP-YTIGLDIGTNSVGWAVLTNQYDLVKRKMKVAGNSDKKQIKKNFWGVRLFDDGQTA--VDRRMNRTARRRIE | 73 |
| AKI42028 | 1 | MKNP-YTIGLDIGTNSVGWAVLTNQYDLVKRKMKVAGNSDKKQIKKNFWGVRLFDDGQTA--VDRRMNRTARRRIE | 76 |
| AKI50529 | 1 | MKNP-YTIGLDIGTNSVGWAVLTNQYDLVKRKMKVAGNSDKKQIKKNFWGVRLFDDGQTA--VDRRMNRTARRRIE | 76 |
| EFR83390 | | ---------------------------------------------------------------------------- | |
| WP_046323366 | 1 | MKKP-YTIGLDIGTNSVGWAALTDQYDLVKRKMKVAGNSEKKQIKKNLWGVRLVDEGKTA--AHRRVNRTTRRRIE | 73 |
| AKE81011 | 1 | ADKK-YSIGLDIGTNSVGWAVITDEYKVPSKKFKVLGNTDRHSIKKNLIGALLFDSGETA--EATRLKRTARRRYT | 89 |
| CUO82355 | 1 | I-VD-YCIGLDLGTGSVGWAVVDMNHRLMKRN------------GKHLWGSRLFSNAETA--ATRRSSRSIRRRYN | 64 |
| WP_033162887 | 1 | KDIR-YSIGLDIGTNSVGWAVMDEHYELLKKG------------NHHMWGSRLFDAAEPA--ATRRASRSIRRRYN | 65 |
| AGZ01981 | 1 | ADKK-YSIGLDIGTNSVGWAVITDEYKVPSKKFKVLGNTDRHSIKKNLIGALLFDSGETA--EATRLKRTARRRYT | 106 |
| AKA60242 | 1 | MDKK-YSIGLAIGTNSVGWAVITDEYKVPSKKFKVLGNTDRHSIKKNLIGALLFDSGETA--EATRLKRTARRRYT | 73 |
| AKS40380 | 1 | MDKK-YSIGLDIGTNSVGWAVITDEYKVPSKKFKVLGNTDRHSIKKNLIGALLFDSGETA--EATRLKRTARRRYT | 73 |
| 4UN5_B | 1 | MDKK-YSIGLAIGTNSVGWAVITDEYKVPSKKFKVLGNTDRHSIKKNLIGALLFDSGETA--EATRLKRTARRRYT | 77 |
| WP_010922251 | 74 | [chemical structure] | 143 |
| WP_039695303 | 75 | RRKNRLRYLQEIFANEIAKVDESFFQRLDE-SFLT--DDDKT---F DSHPIEGNKA-EEDAYHQKEPTIYHLRKHLA | 144 |
| WP_045635197 | 74 | RRKNRLRYLQEIFSEEMSKVDSSFFHRLDD-SFLI--PEDKR---E SKYPIFATLT-EEKEYHKQFPTIYHLRKQLA | 143 |
| 5AXW_A | 62 | RRRHRIQRVKKLLFD---------YNLLTDhSELS----------G --NPYEARVK--------------GLSQKLS | 104 |
| WP_009880683 | | ---------------------------------------------- ------------------------------- | |
| WP_010922251 | 74 | RRKNRICYLQEIFSNEMAKVDDSFFHRLEE-SFLV--EEDKK---H ERHPIFGNIV-DEVAYHEKYPTIYHLRKKLV | 143 |
| WP_011054416 | 74 | RRKNRICYLQEIFSNEMAKVDDSFFHRLEE-SFLV--EEDKK---H ERHPIFGNIV-DEVAYHEKYPTIYHLRKKLA | 143 |
| WP_011284745 | 74 | RRKNRICYLQEIFSNEMAKVDDSFFHRLEE-SFLV--EEDKK---H ERHPIFGNIV-DEVAYHEKYPTIYHLRKKLV | 143 |
| WP_011285506 | 74 | RRKNRICYLQEIFSNEMAKVDDSFFHRLEE-SFLV--EEDKK---H ERHPIFGNIV-DEVAYHEKYPTIYHLRKKLV | 143 |
| WP_011527619 | 74 | RRKNRICYLQEIFSNEMAKVDDSFFHRLEE-SFLV--EEDKK---H ERHPIFGNIV-DEVAYHEKYPTIYHLRKKLV | 143 |
| WP_012560673 | 74 | RRKNRICYLQEIFSNEIAKVDDSFFHRLEE-SFLV--EEDKK---H ERHPIFGNIV-DEVAYHEKYPTIYHLRKKLA | 143 |
| WP_014407541 | 74 | RRKNRICYLQEIFSNEMAKVDDSFFHRLEE-SFLV--EEDKK---H ERHPIFGNIV-DEVAYHEKYPTIYHLRKKLA | 143 |
| WP_020905136 | 74 | RRKNRICYLQEIFSNEMAKVDDSFFHRLEE-SFLV--EEDKK---H ERHPIFGNIV-DEVAYHEKYPTIYHLRKKLV | 143 |
| WP_023080005 | 74 | RRKNRICYLQEIFSNEMAKVDDSFFHRLEE-SFLV--EEDKK---H ERHPIFGNIV-DEVAYHEKYPTIYHLRKKLA | 143 |
| WP_023610282 | 74 | RRKNRICYLQEIFSNEMAKVDDSFFHRLEE-SFLV--EEDKK---H ERHPIFGNIV-DEVAYHEKYPTIYHLRKKLA | 143 |
| WP_030125963 | 74 | RRKNRICYLQEIFSNEMAKVDDSFFHRLEE-SFLV--EEDKK---H ERHPIFGNIV-DEVAYHEKYPTIYHLRKKLV | 143 |
| WP_030126706 | 74 | RRKNRICYLQEIFSNEMAKVDDSFFHRLEE-SFLV--EEDKK---H ERHPIFGNIV-DEVAYHEKYPTIYHLRKKLA | 143 |
| WP_031488318 | 74 | RRKNRICYLQEIFSNEMAKVDDSFFHRLEE-SFLV--EEDKK---H ERHPIFGNIV-DEVAYHEKYPTIYHLRKKLA | 143 |
| WP_032460140 | 74 | RRKNRICYLQEIFSNEIAKVDDSFFHRLEE-SFLV--EEDKK---H ERHPIFGNIV-DEVAYHEKYPTIYHLRKKLA | 143 |
| WP_032461047 | 74 | RRKNRICYLQEIFSNEIAKVDDSFFHRLEE-SFLV--EEDKK---H ERHPIFGNIV-DEVAYHEKYPTIYHLRKKLA | 143 |
| WP_032462016 | 74 | RRKNRICYLQEIFSNEMAKVDDSFFHRLEE-SFLV--EEDKK---H ERHPIFGNIV-DEVAYHEKYPTIYHLRKKLV | 143 |
| WP_032462936 | 74 | RRKNRICYLQEIFSNEMAKVDDSFFHRLEE-SFLV--EEDKK---H ERHPIFGNIV-DEVAYHEKYPTIYHLRKKLA | 143 |
| WP_032464890 | 74 | RRKNRICYLQEIFSNEMAKVDDSFFHRLEE-SFLV--EEDKK---H ERHPIFGNIV-DEVAYHEKYPTIYHLRKKLV | 143 |
| WP_033888930 | | ---------------------------------------------- ------------------------------- | |
| WP_038431314 | 74 | RRKNRICYLQEIFSNEMAKVDDSFFHRLEE-SFLV--EEDKK---H ERHPIFGNIV-DEVAYHEKYPTIYHLRKKLA | 143 |
| WP_038432938 | 74 | RRKNRICYLQEIFSNEMAKVDDSFFHRLEE-SFLV--EEDKK---H ERHPIFGNIV-DEVAYHEKYPTIYHLRKKLA | 143 |
| WP_038434062 | 74 | RRKNRICYLQEIFSNEMAKVDDSFFHRLEE-SFLV--EEDKK---H ERHPIFGNIV-DEVAYHEKYPTIYHLRKKLA | 143 |
| BAQ51233 | 1 | ----------------MAKVDDSFFHRLEE-SFLV--EEDKK---H ERHPIFGNIV-DEVAYHEKYPTIYHLRKKLV | 54 |
| KGE60162 | | ---------------------------------------------- ------------------------------- | |
| KGE60856 | | ---------------------------------------------- ------------------------------- | |
| WP_002989955 | 74 | RRKNRICYLQEIFSNEMAKVDDSFFHRLEE-SFLV--EEDKK---H ERHPIFGNIV-DEVAYHEKYPTIYHLRKKLV | 143 |
| WP_003030002 | 74 | RRRNRLRYLQEIFAEEMNKVDENFFQRLDD-SFLV--DEDKR---G ERHPIFGNIA-AEVKYHDDFPTIYHLRKHLA | 143 |
| WP_003065552 | 75 | RRKNRLRYLQEIFAEEMTKVDESFFQRLDE-SFLRwdDDNKK---L GRYPIEGNKA-DVVKYHQEEPTIYHLRKHLA | 146 |
| WP_001040076 | 74 | RRRNRILYLQEIFAEEMSKVDDSFFHRLED-SFLV--EEDKR---G SKYPIFATLQ-EEKYYHEKFPTIYHLRKELA | 143 |
| WP_001040078 | 74 | RRRNRILYLQEIFAEEMSKVDDSFFHRLED-SFLV--EEDKR---G SKYPIFATLQ-EEKDYHEKFPTIYHLRKELA | 143 |
| WP_001040080 | 74 | RRRNRILYLQEIFAEEMSKVDDSFFHRLED-SFLV--EEDKR---G SKYPIFATLQ-EEKDYHEKFSTIYHLRKELA | 143 |
| WP_001040081 | 74 | RRRNRILYLQEIFAEEMSKVDDSFFHRLED-SFLV--EEDKR---G SKYPIFATLQ-EEKDYHEKFSTIYHLRKELA | 143 |
| WP_001040083 | 74 | RRRNRILYLQEIFAEEMSKVDDSFFHRLED-SFLV--EEDKR---G SKYPIFATLQ-EEKDYHEKFSTIYHLRKELA | 143 |
| WP_001040085 | 74 | RRRNRILYLQEIFAEEMSKVDDSFFHRLED-SFLV--EEDKR---G SKYPIFATLQ-EEKDYHEKFSTIYHLRKELA | 143 |
| WP_001040087 | 74 | RRRNRILYLQEIFAEEMSKVDDSFFHRLED-SFLV--EEDKR---G SKYPIFATLQ-EEKDYHEKFSTIYHLRKELA | 143 |
| WP_001040088 | 74 | RRRNRILYLQEIFAEEMSKVDDSFFHRLED-SFLV--EEDKR---G SKYPIFATLQ-EEKDYHEKFSTIYHLRKELA | 143 |
| WP_001040089 | 74 | RRRNRILYLQEIFAEEMSKVDDSFFHRLED-SFLV--EEDKR---G SKYPIFATLQ-EEKDYHEKFSTIYHLRKELA | 143 |
| WP_001040090 | 74 | RRRNRILYLQEIFAEEMSKVDDSFFHRLED-SFLV--EEDKR---G SKYPIFATLQ-EEKDYHEKFSTIYHLRKELA | 143 |
| WP_001040091 | 74 | RRRNRILYLQEIFAEEMSKVDDSFFHRLED-SFLV--EEDKR---G SKYPIFATLQ-EEKDYHEKFSTIYHLRKELA | 143 |
| WP_001040092 | 74 | RRRNRILYLQEIFAEEMSKVDDSFFHRLED-SFLV--EEDKR---G SKYPIFATMQ-EEKDYHEKFPTIYHLRKELA | 143 |
| WP_001040094 | 74 | RRRNRILYLQEIFAEEMSKVDDSFFHRLED-SFLV--EEDKR---G SKYPIFATMQ-EEKYYHEKFPTIYHLRKELA | 143 |
| WP_001040095 | 74 | RRRNRILYLQEIFAEEMSKVDDSFFHRLED-SFLV--EEDKR---G SKYPIFATMQ-EEKYYHEKFPTIYHLRKELA | 143 |
| WP_001040096 | 74 | RRRNRILYLQEIFAEEMSKVDDSFFHRLED-SFLV--EEDKR---G SKYPIFATMQ-EEKYYHEKFPTIYHLRKELA | 143 |
| WP_001040097 | 74 | RRRNRILYLQEIFAEEMSKVDDSFFHRLED-SFLV--EEDKR---G SKYPIFATMQ-EEKYYHEKFPTIYHLRKELA | 143 |
| WP_001040098 | 74 | RRRNRILYLQEIFAEEMSKVDDSFFHRLED-SFLV--EEDKR---G SKYPIFATMQ-EEKYYHEKFPTIYHLRKELA | 143 |
| WP_001040099 | 74 | RRRNRILYLQEIFAEEMSKVDDSFFHRLED-SFLV--EEDKR---G SKYPIFATMQ-EEKYYHEKFPTIYHLRKELA | 143 |
| WP_001040100 | 74 | RRRNRILYLQEIFAEEMSKVDDSFFHRLED-SFLV--EEDKR---G SKYPIFATMQ-EEKYYHEKFPTIYHLRKELA | 143 |
| WP_001040104 | 74 | RRRNRILYLQEIFAEEMSKVDDSFFHRLED-SFLV--EEDKR---G SKYXIFATLQ-EEKDYHEKFSTIYHLRKELA | 143 |
| WP_001040105 | 74 | RRRNRILYLQEIFAEEMSKVDDSFFHRLED-SFLV--EEDKR---G SKYPIFATLQ-EEKDYHEKFSTIYHLRKELA | 143 |
| WP_001040106 | 74 | CRRNRILYLQEIFAEEMSKVDDSFFHRLED-SFLV--EDDKR---G SKYPIFATMQ-EEKDYHEKFPTIYHLRKELA | 143 |
| WP_001040107 | 74 | RRRNRILYLQEIFAEEMSKVDDSFFHRLED-SFLV--EDDKR---G SKYPIFATMQ-EEKDYHEKFPTIYHLRKELA | 143 |
| WP_001040108 | 74 | RRRNRILYLQEIFAEEMSKVDDSFFHRLED-SFLV--EDDKR---G SKYPIFATMQ-EEKDYHEKFPTIYHLRKELA | 143 |
| WP_001040109 | 74 | RRRNRILYLQEIFAEEMSKVDDSFFHRLED-SFLV--EDDKR---G SKYPIFATMQ-EEKDYHEKFPTIYHLRKELA | 143 |
| WP_001040110 | 74 | RRRNRILYLQEIFAEEMSKVDDSFFHRLED-SFLV--EDDKR---G SKYPIFATMQ-EEKDYHEKFPTIYHLRKELA | 143 |
| WP_015058523 | 74 | RRRNRILYLQEIFAEEMSKVDDSFFHRLED-SFLV--EEDKR---G SKYPIFATMQ-EEKDYHEKFPTIYHLRKELA | 143 |
| WP_017643650 | 74 | RRRNRILYLQEIFAEEMSKVDDSFFHRLED-SFLV--EEDKR---G SKYPIFATMQ-EEKYYHEKFPTIYHLRKELA | 143 |
| WP_017647151 | 74 | RRRNRILYLQEIFAEEMSKVDDSFFHRLED-SFLV--EDDKR---G SKYPIFATMQ-EEKDYHEKFPTIYHLRKELA | 143 |
| WP_017648376 | 74 | RRRNRILYLQEIFAEEMSKVDDSFFHRLED-SFLV--EDDKR---G SKYPIFATMQ-EEKDYHEKFPTIYHLRKELA | 143 |
| WP_017649527 | 74 | RRRNRILYLQEIFAEEMSKVDDSFFHRLED-SFLV--EEDKR---G SKYPIFATLQ-EEKDYHEKFPTIYHLRKELA | 143 |
| WP_017771611 | 74 | RRRNRILYLQEIFAEEMSKVDDSFFHRLED-SFLV--EDDKR---G SKYPIFATMQ-EEKDYHEKFPTIYHLRKELA | 143 |
| WP_017771984 | 74 | RRRNRILYLQEIFAEEMSKVDDSFFHRLED-SFLV--EEDKR---G SKYPIFATLQ-EEKDYHEKFSTIYHLRKELA | 143 |
| CFQ25032 | 74 | RRRNRILYLQEIFAEEMSKVDDSFFHRLED-SFLV--EEDKR---G SKYPIFATLQ-EEKDYHEKFSTIYHLRKELA | 143 |
| CFV16040 | 74 | RRRNRILYLQEIFAEEMSKVDDSFFHRLED-SFLV--EEDKR---G SKYPIFATLQ-EEKDYHEKFSTIYHLRKELA | 143 |
| KLJ37842 | 74 | RRRNRILYLQEIFAEEMSKVDDSFFHRLED-SFLV--EEDKR---G SKYPIFATLQ-EEKDYHEKFSTIYHLRKELA | 143 |
| KLJ72361 | 74 | RRRNRILYLQEIFAEEMSKVDDSFFHRLED-SFLV--EEDKR---G SKYPIFATLQ-EEKDYHEKFSTIYHLRKELA | 143 |
| KLL20707 | 74 | RRRNRILYLQEIFAEEMSKVDDSFFHRLED-SFLV--EEDKR---G SKYPIFATLQ-EEKDYHEKFSTIYHLRKELA | 143 |
| KLL42645 | 74 | RRRNRILYLQEIFAEEMSKVDDSFFHRLED-SFLV--EDDKR---G SKYPIFATMQ-EEKDYHEKFPTIYHLRKELA | 143 |
| WP_047207273 | 74 | RRRNRILYLQEIFAEEMSKVDDSFFHRLED-SFLV--EEDKR---G SKYPIFATLQ-EEKDYHEKFSTIYHLRKELA | 143 |
| WP_047209694 | 74 | RRRNRILYLQEIFAEEMSKVDDSFFHRLED-SFLV--EEDKR---G SKYPIFATMQ-EEKYYHEKFPTIYHLRKELA | 143 |
| WP_050198062 | 74 | RRRNRILYLQEIFAEEMSKVDDSFFHRLED-SFLV--EEDKR---G SKYPIFATLQ-EEKDYHEKFSTIYHLRKELA | 143 |
| WP_050201642 | 74 | RRRNRILYLQEIFAEEMSKVDDSFFHRLED-SFLV--EEDKR---G SKYPIFATLQ-EEKDYHEKFSTIYHLRKELA | 143 |
| WP_050204027 | 74 | RRRNRILYLQEIFAEEMSKVDDSFFHRLED-SFLV--EDDKR---G SKYPIFATMQ-EEKDYHEKFPTIYHLRKELA | 143 |
| WP_050881965 | 74 | RRRNRILYLQEIFAEEMSKVDDSFFHRLED-SFLV--EEDKR---G SKYPIFATLQ-EEKDYHEKFSTIYHLRKELA | 143 |
| WP_050886065 | 74 | RRRNRILYLQEIFAEEMSKVDDSFFHRLED-SFLV--EEDKR---G SKYPIFATLQ-EEKDYHEKFSTIYHLRKELA | 143 |
| AHN30376 | 74 | RRRNRILYLQEIFAEEMSKVDDSFFHRLED-SFLV--EEDKR---G SKYPIFATMQ-EEKDYHEKEPTIYHLRKELA | 143 |
| EAO78426 | 74 | RRRNRILYLQEIFAEEMSKVDDSFFHRLED-SFLV--EEDKR---G SKYPIFATLQ-EEKDYHEKFSTIYHLRKELA | 143 |
| CCW42055 | 74 | RRRNRILYLQEIFAEKMSKVDDSFFHRLED-SFLV--EEDKR---G SKYPIFATLQ-EEKDYHEKEPTIYHLRKELA | 143 |
| WP_003041502 | 74 | RRRNRLRYLQEIFAEEMMQVDESFFQRLDD-SFLV--DEDKR---G ERHPIEGNIA-AEVKYHDEEPTIYHLRKHLA | 143 |
| WP_037593752 | 75 | RRKNRLRYLQEIFTEEMNKVDENFFQRLDD-SFLV--EEDKQ---G SKYPIEGILK-EEKEYHKKEKTIYHLREELA | 144 |
| WP_049516684 | 75 | RRRNRLRYLQEIFAEEMMQVDESFFQRLDD-SFLV--EEDKR---G SRYPIEGNIA-AEVKYHDDEPTIYHLRKHLV | 144 |
| GAD46167 | 74 | RRKNRLRYLQEIFTEEMNKVDENFFQRLDD-SFLV--EEDKQ---G SKYPIEGILK-EEKEYHKKEKTIYHLREELA | 143 |
| WP_018363470 | 75 | RRKNRLRYLQDIFTEEMAKVDDSFFQRLDE-SELT--DNDKN---F DSHPIEGNKA-EEDAYHQKEPTIYHLRKHLA | 144 |
| WP_003043819 | 74 | RRKNRIRYLQEIFANEMAKLDDSFFQRLEE-SFLV--EEDKK---N ERHPIFGNLA-DEVAYHRNYPTIYHLRKKLA | 143 |
| WP_006269658 | 74 | RRKNRLRYLQEIFTGEMNKVDENFFQRLDD-SFLV--DEDKR---G EHHPIEGNIA-AEVKYHDDEPTIYHLRRHLA | 143 |
| WP_048800889 | 74 | RRKNRLRYLQEIFIEEMNKVDENFFQRLDD-SFLV--TEDKR---G SKYPIEGILK-EEKEYYKEFETIYHLRKRLA | 143 |
| WP_012767106 | 74 | RRKNRIRYLQEIFSSEMSKVDDSFFHRLEE-SFLV--EEDKK---H ERHPIFGNIV-DEVAYHEKYPTIYHLRKKLA | 143 |
| WP_014612333 | 74 | RRKNRIRYLQEIFSSEMSKVDDSFFHRLEE-SFLV--EEDKK---H ERHPIFGNIV-DEVAYHEKYPTIYHLRKKLA | 143 |
| WP_015017095 | 74 | RRKNRIRYLQEIFSSEMSKVDDSFFHRLEE-SFLV--EEDKK---H ERHPIFGNIV-DEVAYHEKYPTIYHLRKKLA | 143 |
| WP_015057649 | 74 | RRKNRIRYLQEIFSSEMSKVDDSFFHRLEE-SFLV--EEDKK---H ERHPIFGNIV-DEVAYHEKYPTIYHLRKKLA | 143 |
| WP_048327215 | 74 | RRKNRIRYLQEIFSSEMSKVDDSFFHRLEE-SFLV--EEDKK---H ERHPIFGNIV-DEVAYHEKYPTIYHLRKKLA | 143 |
| WP_049519324 | 74 | RRKNRIRYLQEIFSSEMSKVDDSFFHRLEE-SFLV--EEDKK---H ERHPIFGNIV-DEVAYHEKYPTIYHLRKKLA | 143 |
| WP_012515931 | 74 | RRKNRLRYLKEIFTEEMAKVDDGFFQRLED-SFYV--LEDKE---G NKHPIFANLA-DEVAYHKKYPTIYHLRKELV | 143 |
| WP_021320964 | 74 | RRKNRLRYLKEIFTEEMAKVDDGFFQRLED-SFYV--LEDKE---G NKHPIFANLA-DEVAYHKKYPTIYHLRKELV | 143 |
| WP_037581760 | 74 | RRKNRLRFLKEIFTEEMAKVDDGFFQRLED-SFYV--LEDKE---G NKHPIFANLA-DEVAYHKKYPTIYHLRKELV | 143 |
| WP_004232481 | 74 | RRKNRLRYLQEIFAKEMAKVDESFFQRLEE-SELT--DDDKT---F DSHPIEGNKA-EEDTYHQEFPTIYHLRKHLA | 143 |
| WP_009854540 | 75 | RRKNRLRYLQEIFAEEMTKVDESFFYRLDE-SELT--TDEKD---F ERHPIEGNKA-EEDAYHQKEPTIYHLRNYLA | 144 |
| WP_012962174 | 75 | RRKNRLRYLQEIFAEEMAKVDESFFYRLDE-SELT--TDDKD---F ERHPIFGNKA-DEIKYHQEFPTIYHLRKHLA | 144 |
| WP_039695303 | 75 | RRKNRLRYLQEIFANEIAKVDESFFQRLDE-SELT--DDDKT---F DSHPIEGNKA-EEDAYHQKEPTIYHLRKHLA | 144 |
| WP_014334983 | 74 | RRKNRLRYLQEIFAKEMTKVDESFFQRLEE-SELT--DDDKT---F DSHPIEGNKA-EEDAYHQKEPTIYHLRKYLA | 143 |
| WP_003099269 | 74 | RRKYRIKELQKIFSSEMNELDIAFFPRLSE-SFLV--SDDKE---F ENHPIFGNLK-DEITYHNDYPTIYHLRQTLA | 143 |
| AHY15608 | 74 | RRKYRIKELQKIFSSEMNELDIAFFPRLSE-SFLV--SDDKE---F ENHPIFGNLK-DEITYHNDYPTIYHLRQTLA | 143 |
| AHY17476 | 74 | RRKYRIKELQKIFSSEMNELDIAFFPRLSE-SFLV--SDDKE---F ENHPIFGNLK-DEITYHNDYPTIYHLRQTLA | 143 |
| ESR09100 | | ---------------------------------------------- ------------------------------- | |
| AGM98575 | 74 | RRKYRIKELQKIFSSEMNELDIAFFPRLSE-SFLV--SDDKE---F ENHPIFGNLK-DEITYHNDYPTIYHLRQTLA | 143 |
| ALF27331 | 74 | RRRNRILYLQEIFSEEMGKVDDSFFHRLED-SFLV--TEDKR---G ERHPIEGNLE-EEVKYHENEPTIYHLRQYLA | 143 |
| WP_018372492 | 74 | RRRNRIRYLQHIFAEEMNRADENFFHRLKE-SFFV--EEDKT---Y SKYPIFGTLE-EEKNYHKNYPTIYHLRKTLA | 143 |
| WP_045618028 | 75 | RRKNRLRYLQEIFTEEMSKVDISFFHRLDD-SFLV--PEDKR---G SKYPIFATLE-EEKEYHKNFPTIYHLRKHLA | 144 |
| WP_045635197 | 74 | RRKNRLRYLQEIFSEEMSKVDSSFEHRLDD-SFLI--PEDKR---E SKYPIFATLT-EEKEYHKQFPTIYHLRKQLA | 143 |
| WP_002263549 | 74 | RRRNRILYLQEIFSEEMGKVDDSFFHRLED-SFLV--TEDKR---G ERHPIEGNLE-EEVKYHENEPTIYHLRQYLA | 143 |
| WP_002263887 | 74 | RRRNRILYLQEIFSEEMGKVDDSFFHRLED-SFLV--TEDKR---G ERHPIEGNLE-EEVKYHENEPTIYHLRQYLA | 143 |
| WP_002264920 | 74 | RRRNRILYLQEIFSEEMGKVDDSFFHRLDE-SELT--DDDKN---F DSYPIEGNKA-EEDAYHQKEPTIYHLRKHLA | 143 |
| WP_002269043 | 74 | RRRNRILYLQEIFSEEMGKVDDSFFHRLED-SFLV--TEDKR---G ERHPIEGNLE-EEVKYHENEPTIYHLRQYLA | 143 |
| WP_002269448 | 74 | RRRNRILYLQEIFSEEMGKVDDSFEHRLED-SELV--TEDKR---G ERHPIEGNLE-EEVKYHENEPTIYHLRQYLA | 143 |
| WP_002271977 | 74 | RRRNRILYLQEIFSEEMGKVDDSFEHRLED-SELV--TEDKR---G ERHPIEGNLE-EEVKYHENEPTIYHLRQYLA | 143 |
| WP_002272766 | 74 | RRRNRILYLQEIFSEEMGKVDDSFEHRLED-SELV--TEDKR---G ERHPIEGNLE-EEVKYHENEPTIYHLRQYLA | 143 |
| WP_002273241 | 74 | RRRNRILYLQEIFSEEMGKVDDSFEHRLED-SELV--TEDKR---G ERHPIEGNLE-EEVKYHENEPTIYHLRQYLA | 143 |
| WP_002275430 | 74 | RRRNRILYLQEIFAEEMSKVDDSFEHRLED-SELV--TEDKR---G ERHPIEGNLE-EEVKYHENEPTIYHLRQYLA | 143 |
| WP_002276448 | 74 | RRRNRILYLQEIFSEEMGKVDDSFEHRLED-SELV--TEDKR---G ERHPIEGNLE-EEVKYHENEPTIYHLRQYLA | 143 |
| WP_002277050 | 74 | RRRNRILYLQEIFSEEMGKVDDSFEHRLDE-SFLT--DDDKN---F DSHPIEGNKA-EEDAYHQKEPTIYHLRKHLA | 143 |
| WP_002277364 | 74 | RRRNRILYLQEIFAEEMSKVDDSFEHRLED-SELV--TEDKR---G ERHPIEGNLE-EEVKYHENEPTIYHLRQYLA | 143 |
| WP_002279025 | 74 | RRRNRILYLQEIFSEEMGKVDDSFEHRLED-FELV--TEDKR---G ERHPIEGNLE-EEVKYHENEPTIYHLRQYLA | 143 |
| WP_002279859 | 74 | RRRNRILYLQEIFSEEMGKVDDSFEHRLDE-SFLT--DDDKN---F DSHPIEGNKA-EEDAYHQKEPTIYHLRKHLA | 143 |
| WP_002280230 | 74 | RRRNRILYLQEIFAEEMSKVDDSFEHRLED-SELV--TEDKR---G ERHPIEGNLE-EEVKYHENEPTIYHLRQYLA | 143 |
| WP_002281696 | 74 | RRRNRILYLQEIFAEEMSKVDDSFEHRLED-SELV--TEDKR---G ERHPIEGNLE-EEVKYHENEPTIYHLRQYLA | 143 |
| WP_002282247 | 74 | RRRNRILYLQEIFAEEMSKVDDSFEHRLDE-SFLT--DDDKN---F DSHPIEGNKA-EEDAYHQKEPTIYHLRKHLA | 143 |
| WP_002282906 | 74 | RRRNRILYLQEIFSEEMGKVDDSFEHRLED-SELV--TEDKR---G ERHPIEGNLE-EEVKYHENEPTIYHLRQYLA | 143 |
| WP_002283846 | 74 | RRRNRILYLQEIFSEEMGKVDDSFEHRLED-SELV--TEDKR---G ERHPIEGNLE-EEVKYHENEPTIYHLRQYLA | 143 |
| WP_002287255 | 74 | RRRNRILYLQEIFAEEMSKVDDSFEHRLED-SELV--TEDKR---G ERHPIEGNLE-EEVKYHENEPTIYHLRQYLA | 143 |
| WP_002288990 | 74 | RRRNRILYLQEIFSEEMGKVDDSFEHRLED-SELV--TEDKR---G ERHPIEGNLE-EEVKYHENEPTIYHLRQYLA | 143 |
| WP_002289641 | 74 | RRRNRILYLQEIFSEEMGKVDDSFEHRLED-SELV--TEDKR---G ERHPIEGNLE-EEVKYHENEPTIYHLRQYLA | 143 |
| WP_002290427 | 74 | RRRNRILYLQEIFSEEMGKVDDSFEHRLED-SELV--TEDKR---G ERHPIEGNLE-EEVKYHENEPTIYHLRQYLA | 143 |
| WP_002295753 | 74 | RRRNRILYLQEIFSEEMGKVNDSFEHRLED-SELV--TEDKR---G ERHPIEGNLE-EEVKYHENEPTIYHLRQYLA | 143 |
| WP_002296423 | 74 | RRRNRILYLQEIFSEEMGKVDDSFEHRLED-SELV--TEDKR---G ERHPIEGNLE-EEVKYHENEPTIYHLRQYLA | 143 |
| WP_002304487 | 74 | RRRNRILYLQEIFAEEMMQVDESFFQRLDD-SFLV--EEDKR---G SRYPIEGILK-EEKKYHKEEKTIYHLREKLA | 143 |
| WP_002305844 | 74 | RRRNRILYLQEIFSEEMDKVDDSFEHRLED-SELV--TEDKR---G ERHPIEGNLE-EEVKYHENEPTIYHLRQYLA | 143 |
| WP_002307203 | 74 | RRRNRILYLQEIFSEEMGKVDDSFEHRLED-SELV--TEDKR---G ERHPIEGNLE-EEVKYHENEPTIYHLRQYLA | 143 |
| WP_002310390 | 74 | RRRNRILYLQEIFSEEMGKVDDSFEHRLED-SELV--TEDKR---G ERHPIEGNLE-EEVKYHENEPTIYHLRQYLA | 143 |
| WP_002352408 | 74 | RRRNRILYLQEIFSEEMGKVDDSFEHRLED-SELV--TEDKR---G ERHPIEGNLE-EEVKYHENEPTIYHLRQYLA | 143 |
| WP_012997688 | 74 | RRRNRILYLQEIFAEEMSKVDDSFEHRLED-SELV--TEDKR---G ERHPIEGNLE-EEVKYHENEPTIYHLRQYLA | 143 |
| WP_014677909 | 74 | RRRNRILYLQEIFSEEMGKVDDSFEHRLED-SELV--TEDKR---G ERHPIEGNLE-EEVKYHENEPTIYHLRQYLA | 143 |
| WP_019312892 | 74 | RRRNRILYLQEIFAEEMSKVDDSFEHRLED-SELV--TEDKR---G ERHPIEGNLE-EEVKYHENEPTIYHLRQYLA | 143 |
| WP_019313659 | 74 | RRRNRILYLQEIFSEEMGKVDDSFEHRLED-SELV--TEDKR---G ERHPIEGNLE-EEVKYHENEPTIYHLRQYLA | 143 |
| WP_019314093 | 74 | RRRNRILYLQEIFSEEMGKVDDSFEHRLED-SELV--TEDKR---G ERHPIEGNLE-EEVKYHENEPTIYHLRQYLA | 143 |
| WP_019315370 | 74 | RRRNRILYLQEIFSEEMGKVDDSFEHRLED-SELV--TEDKR---G ECHPIEGNLE-EEVKYHENEPTIYHLRQYLA | 143 |
| WP_019803776 | 74 | RRRNRILYLQEIFSEEMGKVDDSFEHRLED-SELV--TEDKR---G ERHPIEGNLE-EEVKYHENEPTIYHLRQYLA | 143 |
| WP_019805234 | 74 | RRRNRILYLQEIFSEEMGKVDDSFEHRLED-SELV--TEDKR---G ERHPIEGNLE-EEVKYHENEPTIYHLRQYLA | 143 |
| WP_024783594 | 74 | RRRNRILYLQEIFSEEMGKVDDSFEHRLED-SELV--TEDKR---G ERHPIEGNLE-EEVKYHENEPTIYHLRQYLA | 143 |
| WP_024784288 | 74 | RRRNRILYLQEIFAEEMSKVDDSFEHRLDE-SFLT--DDDKN---F DSHPIEGNKA-EEDAYHQKEPTIYHLRKHLA | 143 |
| WP_024784666 | 74 | RRRNRILYLQEIFAEEMSKVDDSFEHRLED-SELV--TEDKR---G ERHPIEGNLE-EEVKYHENEPTIYHLRQYLA | 143 |
| WP_024784894 | 74 | RRRNRILYLQEIFSEEMGKVDDSFEHRLED-SELV--TEDKR---G ERHPIEGNLE-EEVKYHENEPTIYHLRQYLA | 143 |
| WP_024786433 | 74 | RRRNRILYLQEIFAEEMNKVDDSFEHRLDE-SFLT--DDDKN---F DSHPIEGNKA-EEDAYHQKEPTIYHLRKHLA | 143 |
| WP_049473442 | 74 | RRRNRILYLQEIFAEEMSKVDDSFFHRLED-SFLV--TEDKR---G ERHPIFGNLE-EEVKYYENFPTIYHLRQYLA | 143 |
| WP_049474547 | 74 | RRRNRILYLQEIFSEEMGKVDDSFFHRLED-SFLV--TEDKR---G ERHPIFGNLE-EEVKYHENFPTIYHLRQYLA | 143 |
| EMC03581 | 67 | RRRNRILYLQEIFAEEMSKVDDSFFHRLED-SFLV--TEDKR---G ERHPIFGNLE-EEVKYHENFPTIYHLRQYLA | 136 |
| WP_000428612 | 75 | RRKNRLRYLQEIFAEEMSKVDSSFFHRLDD-SFLI--PEDKK---G SKYPIFATLI-EEKEYHKQFPTIYHLRKQLA | 144 |
| WP_000428613 | 75 | RRKNRLRYLQEIFAEEMSKVDSSFFHRLDD-SFLI--PEDKR---G SKYPIFATLA-EEKEYHKQFPTIYHLRKQLA | 144 |
| WP_049523028 | 74 | RRRNRILYLQEIFAAEMNKVDESFFHRLDD-SFLV--PEDKR---G SKYPIFGTLE-EEKEYHKQFPTIYYLRKILA | 143 |
| WP_003107102 | 43 | RRINRIKYLQSIFDDEMSKIDSAFFQRIKD-SFLV--PDDKN---D DRHPIFGNIK-DEVDYHKNYPTIYHLRKKLA | 112 |
| WP_054279288 | 76 | RRKNRLCYLRDIFESEMHTIDKHFFLRLED-SFLH--KSDKR---Y EAHPIEGTLQ-EEKAYHDNYPTIYHLRKALA | 145 |
| WP_049531101 | 75 | RRKNRLRYLQEIFSEEISKVDNSFFHRLDD-SFLV--PEDKR---G SKYPIFATLT-EEKEYYKQFPTIYHLRKQLA | 144 |
| WP_049538452 | 75 | RRKNRLRYLQEIFAEEMNKVDSSFFHRLDD-SFLV--PEDKR---G SKYPIFATLA-EEKEYHKNFPTIYHLRKQLA | 144 |
| WP_049549711 | 75 | RRKNRLRYLQEIFSGEMSKVDSSFFHRLDD-SFLV--PEDKR---G SKYPIFATLV-EEKEYHKQFPTIYHLRKQLA | 144 |
| WP_007896501 | 76 | RRRYRLCQLQNIFATEMVKVDDIFFQRLSE-SFFY--YQDKA---F DKHPIFGNSK-EERAYHKTYPTIYHLRKDLA | 145 |
| EFR44625 | 28 | RRRYRLCQLQNIFATEMVKVDDIFFQRLSE-SFFY--YQDKA---F DKHPIFGNSK-EERAYHKTYPTIYHLRKDLA | 97 |
| WP_002897477 | 74 | RRRNRILYLQEIFTESMNEIDESFFHRLDD-SFLV--PEDKR---G SKYPIFATLQ-EEKEYHKQFPTIYHLRKQLA | 143 |
| WP_002906454 | 74 | RRKNRLRYLQEIFSEEISKLDSSFFHRLDD-SFLV--PEDKR---G SKYPIFATLE-EEKEYHKKFPTIYHLRKHLA | 143 |
| WP_009729476 | 75 | RRKNRLRYLQEIFSEEIGKVDSSFFHRLDD-SFLI--PEDKR---G SKYPIFATLA-EEKKYHKQFPTIYHLRKQLA | 144 |
| CQR24647 | 74 | RRRNRILYLQDIFSPELNQVDESFLHRLDD-SFLVa--EDKR---G ERHVIFGNIA-DEVKYHKEFPTIYHLRKHLA | 143 |
| WP_000066813 | 75 | RRKNRLRYLQEIFSQEISKVDSSFFHRLDD-FFLV--PEDKR---G SKYPIFATLV-EEKEYHKKEPTIYHLRKHLA | 144 |
| WP_009754323 | 75 | RRKNRLRYLQEIFAEEMSKVDSSFFHRLDD-SFLV--PEDKS---G SKYPIFATLA-EEKEYHKKFPTIYHLRKHLA | 144 |
| WP_044674937 | 74 | RRRNRILYLQEIFAEEINKIDDSFFQRLDD-SFLIv--EDKQ---G SKHPIFGTLQ-EEKKYHKQFPTIYHLRKQLA | 143 |
| WP_044676715 | 74 | RRRNRILYLQEIFAEEINKIDDSFFQRLDD-SFLIv--EDKQ---G SKHPIFGTLQ-EEKEYHKQFPTIYHLRKQLA | 143 |
| WP_044680361 | 74 | RRRNRILYLQEIFAEEINKIDDSFFQRLDD-SFLIv--EDKQ---G SKHPIFGTLQ-EEKEYHKQFPTIYHLRKQLA | 143 |
| WP_044681799 | 74 | RRRNRILYLQEIFAEEINKIDDSFFQRLDD-SFLIv--EDKQ---G SKHPIFGTLQ-EEKKYHKQFPTIYHLRKQLA | 143 |
| WP_049533112 | 74 | RRRNRLRYLQEIFAEEMNKVDENFFQRLDD-SFLV--DEDKR---G ERHPIFGNIA-AEVKYHDDFPTIYHLRKHLA | 143 |
| WP_029090905 | 28 | HRKFRLRLLEDMFEKEILSKDPSFFIRLKE-AFLSpkDEQKQ---F ----LFNDKDyTDADYYEQYKTIYHLRYDLI | 100 |
| WP_006506696 | 61 | KRRERIRLLRAILQDMVLEKDPTFFIRLEHtSFLD--EEDKAkylG DNYNLFIDEDfNDYTYYHKYPTIYHLRKALC | 139 |
| AIT42264 | 74 | RRKNRICYLQEIFSNEMAKVDDSFFHRLEE-SFLV--EEDKK---H ERHPIFGNIV-DEVAYHEKYPTIYHLRKKLV | 143 |
| WP_034440723 | 73 | RRRFRIRELQKIFDKSMGEVDSNFFHRLDE-SFLV--EEDKE---Y SKYPIFSNEK-EDKNYYDKYPTIYHLRKDLA | 142 |
| AKQ21048 | 74 | RRKNRICYLQEIFSNEMAKVDDSFFHRLEE-SFLV--EEDKK---H ERHPIFGNIV-DEVAYHEKYPTIYHLRKKLV | 143 |
| WP_004636532 | 74 | RRRNRLIYLQDIFQQPMLAIDENFFHRLDD-SFFV--PDDKS---Y DRHPIFGSLE-EEVAYHNTYPTIYHLRKHLA | 143 |
| WP_002364836 | 74 | RRRNRLRYLQAFFEEAMIDLDENFFARLQE-SFLV--PEDKK---W HRHPIFAKLE-DEVAYHETYPTIYHLRKKLA | 143 |
| WP_016631044 | 25 | RRRNRLRYLQAFFEEAMIDLDENFFARLQE-SFLV--PEDKK---W HRHPIFAKLE-DEVAYHETYPTIYHLRKKLA | 94 |
| EMS75795 | | ---------------------------------------------- ------------------------------- | |
| WP_002373311 | 74 | RRRNRLRYLQAFFEEAMIDLDENFFARLQE-SFLV--PEDKK---W HRHPIFAKLE-DEVAYHETYPTIYHLRKKLA | 143 |
| WP_002378009 | 74 | RRRNRLRYLQAFFEEAMTALDENFFARLQE-SFLV--PEDKK---W HRHPIFAKLE-DEVAYHETYPTIYHLRKKLA | 143 |
| WP_002407324 | 74 | RRRNRLRYLQAFFEEAMTALDENFFARLQE-SFLV--PEDKK---W HRHPIFAKLE-DEVAYHETYPTIYHLRKKLA | 143 |
| WP_002413717 | 74 | RRRNRLRYLQAFFEEAMIDLDENFFARLQE-SFLV--PEDKK---W HRHPIFAKLE-DEVAYHETYPTIYHLRKKLA | 143 |
| WP_010775580 | 74 | RRRNRLRYLQAFFEEAMTALDENFFARLQE-SFLV--PEDKK---W HRHPIFAKLE-DEVAYHETYPTIYHLRKKLA | 143 |
| WP_010818269 | 74 | RRRNRLRYLQAFFEEAMTALDENFFARLQE-SFLV--PEDKK---W HRHPIFAKLE-DEVAYHETYPTIYHLRKKLA | 143 |
| WP_010824395 | 74 | RRRNRLRYLQAFFEEAMTDLDENFFARLQE-SFLV--PEDKK---W HRHPIFAKLE-DEVAYHETYPTIYHLRKKLA | 143 |
| WP_016622645 | 74 | RRRNRLRYLQAFFEEAMTALDENFFARLQE-SFLV--PEDKK---W HRHPIFAKLE-DEVAYHETYPTIYHLRKKLA | 143 |
| WP_033624816 | 74 | RRRNRLRYLQAFFEEAMTALDENFFARLQE-SFLV--PEDKK---W HRHPIFAKLE-DEVAYHETYPTIYHLRKKLA | 143 |
| WP_033625576 | 74 | RRRNRLRYLQAFFEEAMTALDENFFARLQE-SFLV--PEDKK---W HRHPIFAKLE-DEVAYHETYPTIYHLRKKLA | 143 |
| WP_033789179 | 74 | RRRNRLRYLQAFFEEAMTALDENFFARLQE-SFLV--PEDKK---W HRHPIFAKLE-DEVAYHETYPTIYHLRKKLA | 143 |
| WP_002310644 | 74 | RRRQRILELQKIFAPEILKIDEHFFARLNE-SFLV--LDEKK---Q SRHPVFATIK-QEKSYHQTYPTIYHLRQALA | 143 |
| WP_002312694 | 74 | RRRQRILELQKIFAPEILKIDEHFFARLNE-SFLV--PDEKK---Q SRHPVFATIK-QEKSYHQTYPTIYHLRQALA | 143 |
| WP_002314015 | 74 | RRRQRILELQKIFAPEILKIDEHFFARLNE-SFLV--LDEKK---Q SRHPVFATIK-QEKSYHQTYPTIYHLRQALA | 143 |
| WP_002320716 | 74 | RRRQRILELQKIFAPEILKIDEHFFARLNE-SFLV--LDEKK---Q SRHPVFATIK-QEKSYHQTYPTIYHLRQALA | 143 |
| WP_002330729 | 74 | RRRQRILELQKIFAPEILKIDEHFFARLNE-SFLV--LDEKK---Q SRHPVFATIK-QEKSYHQTYPTIYHLRQALA | 143 |
| WP_002335161 | 74 | RRRQRILELQKIFAPEILKIDEHFFARLNE-SFLV--LDEKK---Q SRHPVFATIK-QEKSYHQTYPTIYHLRQALA | 143 |
| WP_002345439 | 74 | RRRQRILELQKIFAPEILKIDEHFFARLNE-SFLV--LDEKK---Q SRHPVFATIK-QEKSYHQTYPTIYHLRQALA | 143 |
| WP_034867970 | 74 | RRKYRLSKLQDLFAEELCKQDDCFFVRLEE-SFLV--PEEKQ---Y KPASIFPTLE-EEKEYYQKYPTIYHLRQKLV | 143 |
| WP_047937432 | 74 | RRRQRILELQKIFAPEILKIDEHFFARLNE-SFLV--LDEKK---Q SRHPVFATIK-QEKSYHQTYPTIYHLRQALA | 143 |
| WP_010720994 | 74 | RRKYRLSKLQDLFAEELCKQDDCFFVRLEE-SFLV--PEEKQ---Y KPASIFPTLE-EEKEYYQKYPTIYHLRQKLV | 143 |
| WP_010737004 | 74 | RRKYRLSKLQDLFAEELCKQDDCFFVRLEE-SFLV--PEEKQ---Y KPASIFPTLE-EEKEYYQKYPTIYHLRQKLV | 143 |
| WP_034700478 | 74 | RRKYRLSKLQDLFAEELCKQDDCFFVRLEE-SFLV--PEEKQ---Y KPASIFPTLE-EEKEYYQKYPTIYHLRQKLV | 143 |
| WP_007209003 | 74 | RRKNRICYLQEIFQPEMNHLDNNFFYRLNE-SFLVa--DDAK---Y DKHPIFGILD-EEIHFHEQFPTIYHLRKYLA | 143 |
| WP_023519017 | 74 | RRRQRVLALQDIFAEEIHKKDPNFFARLEE-GDRV--EADKR---F AKFFVFAILS-EEKNYHRQYPTIYHLRHDLA | 143 |
| WP_010770040 | 74 | RRRNRICRLQDLFTEEMNQVDANFFHRLQE-SFLV--PDEKE---F ERHAIFGKME-EEVSYYREFPTIYHLRKHLA | 143 |
| WP_048604708 | 74 | RRRQRISYLQIFFQEEMNRIDPNFFNRLDE-SFLI--EEDKL---S ERHPIFGTIE-EEVAYHKNYATIYHLRKELA | 143 |
| WP_010750235 | 74 | RRKYRILELQKIFSEEILKKDSHFFARLDE-SFLI--PEDKQ---Y ARFPIFPILL-EEKAYYQNYPTIYHLRQKLA | 143 |
| AII16583 | 113 | RRKNRICYLQEIFSNEMAKVDDSFFHRLEE-SFLV--EEDKK---H ERHPIFGNIV-DEVAYHEKYPTIYHLRKKLV | 182 |
| WP_029073316 | 66 | KRRERIRLLRGIMEDMVLDVDPIFFIRLANvSFLD--QEDKKdylK SNYNLFIDKDfNDKTYYDKYPTIYHLRKHLC | 144 |
| WP_031589969 | 66 | KRRERIRLLREIMEDMVLDVDPIFFIRLANvSFLD--QEDKKdylK SNYNLFIDKDfNDKTYYDKYPTIYHLRKHLC | 144 |
| KDA45870 | 75 | RRKNRLRYLQEIFAPALAKVDPNFFYRLEE-SSLVa--EDKK---Y DVYPIFGKRE-EELLYHDTHKTIYHLRSELA | 144 |
| WP_039099354 | 62 | RRKWRLGLLREIFEPYITPVDDIFFLRKKQ-SNLS--PKDQR---K -QTSLENDRT--DRAFYDDYPTIYHLRYKLM | 132 |
| AKP02966 | 65 | RRKNRINWLNEIFSEELANTDPSFLIRLQN-SWVSkkDPDRK---R DKYNLFIDNPyTDKEYYREFPTIFHLRKELI | 137 |
| WP_010991369 | 74 | RRRNRISYLQGIFAEEMSKTDANFFCRLSD-SFYV--DNEKR---N SRHPFFATIE-EEVEYHKNYPTIYHLREELV | 143 |
| WP_033838504 | 74 | RRRNRISYLQGIFAEEMSKTDANFFCRLSD-SFYV--DNEKR---N SRHPFFATIE-EEVEYHKNYPTIYHLREELV | 143 |
| EHN60060 | 77 | RRRNRISYLQGIFAEEMSKTDANFFCRLSD-SFYV--DNEKR---N SRHPFFATIE-EEVEYHKNYPTIYHLREELV | 146 |
| EFR89594 | | ---------------------------------------------- ------------------------------- | |
| WP_038409211 | 74 | RRRNRIAYLQEIFAAEMAEVDANFFYRLED-SFYI--ESEKR---H SRHPFFATIE-EEVAYHEEYKTIYHLREKLV | 143 |
| EFR95520 | | ---------------------------------------------- ------------------------------- | |
| WP_003723650 | 74 | RRRNRISYLQEIFAVEMANIDANFFCRLND-SFYV--DSEKR---N SRHPFFATIE-EEVAYHDNYRTIYHLREKLV | 143 |
| WP_003727705 | 74 | RRRNRISYLQEIFAVEMANIDANFFCRLND-SFYV--DSEKR---N SRHPFFATIE-EEVAYHKNYRTIYHLREELV | 143 |
| WP_003730785 | 74 | RRRNRISYLQEIFAVEMANIDANFFCRLND-SFYV--DSEKR---N SRHPFFATIE-EEVAYHKNYRTIYHLREELV | 143 |
| WP_003733029 | 74 | RRRNRISYLQEIFAIQMNEVDDNFFNRLKE-SFYA--ESDKK---Y NRHPFFGTVE-EEVAYYKDFPTIYHLRKELI | 143 |
| WP_003739838 | 74 | RRRNRISYLQEIFALEMANIDANFFCRLND-SFYV--DSEKR---N SRHPFFATIE-EEVAYHKNYRTIYHLREELV | 143 |
| WP_014601172 | 74 | RRRNRISYLQEIFAVEMANIDANFFCRLND-SFYV--DSEKR---N SRHPFEATIE-EEVAYHKNYRTIYHLREELV | 143 |
| WP_023548323 | 74 | RRRNRISYLQEIFAVEMANIDANFFCRLND-SFYV--DSEKR---N SRHPFEATIE-EEVAYHKNYRTIYHLREELV | 143 |
| WP_031665337 | 74 | RRRNRISYLQEIFAVEMANIDANFFCRLND-SFYV--DSEKR---N SRHPFEATIE-EEVAYHKNYRTIYHLREELV | 143 |
| WP_031669209 | 74 | RRRNRISYLQEIFAIQMNEVDDNFFNRLKE-SFYA--ESDKK---Y NRHPFEGTVE-EEVAYYKDEPTIYHLRKELI | 143 |
| WP_033920898 | 74 | RRRNRISYLQEIFAVEMANIDANFFCRLND-SFYV--DSEKR---N SRHPFEATIE-EEVAYHKNYRTIYHLREELV | 143 |
| AKI42028 | 77 | RRRNRISYLQEIFAVEMANIDANFFCRLND-SFYV--DSEKR---N SRHPFEATIE-EEVAYHKNYRTIYHLREELV | 146 |
| AKI50529 | 77 | RRRNRISYLQEIFAVEMANIDANFFCRLND-SFYV--DSEKR---N SRHPFEATIE-EEVAYHKNYRTIYHLREELV | 146 |
| EFR83390 | | ---------------------------------------------- ------------------------------- | |
| WP_046323366 | 74 | RRRNRISYLQEIFTAEMFEVDANFFYRLED-SFYI--ESEKR---Q SRHPFEATIE-EEVAYHENYRTIYHLREKLV | 143 |
| AKE81011 | 90 | RRKNRICYLQEIFSNEMAKVDDSFFHRLEE-SFLV--EEDKK---H ERHPIFGNIV-DEVAYHEKYPTIYHLRKKLV | 159 |
| CUO82355 | 65 | KRRERIRLLRAILQDMVLEKDPTFFIRLEHtSFLD--EEDKAkylG DNYNLFIDEDfNDYTYYHKYPTIYHLRKALC | 143 |
| WP_033162887 | 66 | KRRERIRLLRDLLGDMVMEVDPIFFIRLLNvSFLD--EEDKQknlG DNYNLFIEKDfNDKTYYDKYPTIYHLRKELC | 144 |
| AGZ01981 | 107 | RRKNRICYLQEIFSNEMAKVDDSFFHRLEE-SFLV--EEDKK---H ERHPIFGNIV-DEVAYHEKYPTIYHLRKKLV | 176 |
| AKA60242 | 74 | RRKNRICYLQEIFSNEMAKVDDSFFHRLEE-SFLV--EEDKK---H ERHPIFGNIV-DEVAYHEKYPTIYHLRKKLV | 143 |
| AKS40380 | 74 | RRKNRICYLQEIFSNEMAKVDDSFFHRLEE-SFLV--EEDKK---H ERHPIFGNIV-DEVAYHEKYPTIYHLRKKLV | 143 |
| 4UN5_B | 78 | RRKNRICYLQEIFSNEMAKVDDSFFHRLEE-SFLV--EEDKK---H ERHPIFGNIV-DEVAYHEKYPTIYHLRKKLV | 147 |
| WP_010922251 | 144 | [chemical structure] | 211 |
| WP_039695303 | 145 | DSSEKADLRLVYLALAHMIKFRGHFLIEGE-LNAENTDVQKI--FADFVGVYNRT--FDDS-H LSEITVDVA---SI | 212 |
| WP_045635197 | 144 | DSKEKTDLRLIYLALAHMIKYRGHFLYEEA-FDIKNNDIQKI--FNEFISIYDNT--FEGS-S LSGQNAQVE---AI | 211 |
| 5AXW_A | 105 | EEEFSA-------ALLHLAKRRG---VHNV------NEVE------------EDT----GN-- --------E----- | 134 |
| WP_009880683 | | --------------------------------------------------------------- -------------- | |
| WP_010922251 | 144 | DSTDKADLRLIYLALAHMIKFRGHFLIEGD-LNPDNSDVDKL--FIQLVQTYNQL--FEEN-- INASGVDAK---AI | 211 |
| WP_011054416 | 144 | DSTDKVDLRLIYLALAHMIKFRGHFLIEGD-LNPDNSDVDKL--FIQLVQTYNQL--FEEN-- INASRVDAK---AI | 211 |
| WP_011284745 | 144 | DSTDKADLRLIYLALAHMIKFRGHFLIEGD-LNPDNSDVDKL--FIQLVQTYNQL--FEEN-- INASGVDAK---AI | 211 |
| WP_011285506 | 144 | DSTDKADLRLIYLALAHMIKFRGHFLIEGD-LNPDNSDVDKL--FIQLVQTYNQL--FEEN-- INASGVDAK---AI | 211 |
| WP_011527619 | 144 | DSTDKADLRLIYLALAHMIKFRGHFLIEGD-LNPDNSDVDKL--FIQLVQTYNQL--FEEN-- INASGVDAK---AI | 211 |
| WP_012560673 | 144 | DSTDKADLRLIYLALAHMIKFRGHFLIEGD-LNPDNSDVDKL--FIQLVQTYNQL--FEEN-- INASRVDAK---AI | 211 |
| WP_014407541 | 144 | DSTDKADLRLIYLALAHMIKFRGHFLIEGD-LNPDNSDVDKL--FIQLVQIYNQL--FEEN-- INASRVDAK---AI | 211 |
| WP_020905136 | 144 | DSTDKADLRLIYLALAHMIKFRGHFLIEGD-LNPDNSDVDKL--FIQLVQTYNQL--FEEN-- INASGVDAK---AI | 211 |
| WP_023080005 | 144 | DSTDKVDLRLIYLALAHMIKFRGHFLIEGD-LNPDNSDVDKL--FIQLVQTYNQL--FEEN-- INASRVDAK---AI | 211 |
| WP_023610282 | 144 | DSTDKVDLRLIYLALAHMIKFRGHFLIEGD-LNPDNSDVDKL--FIQLVQTYNQL--FEEN-- INASRVDAK---AI | 211 |
| WP_030125963 | 144 | DSTDKADLRLIYLALAHMIKFRGHFLIEGD-LNPDNSDVDKL--FIQLVQTYNQL--FEEN-- INASGVDAK---AI | 211 |
| WP_030126706 | 144 | DSTDKVDLRLIYLALAHMIKFRGHFLIEGD-LNPDNSDVDKL--FIQLVQTYNQL--FEEN-- INASRVDAK---AI | 211 |
| WP_031488318 | 144 | DSTDKADLRLIYLALAHMIKFRGHFLIEGD-LNPDNSDVDKL--FIQLVQTYNQL--FEEN-- INASRVDAK---AI | 211 |
| WP_032460140 | 144 | DSTDKADLRLIYLALAHMIKFRGHFLIEGD-LNPDNSDVDKL--FIQLVQTYNQL--FEEN-- INASRVDAK---AI | 211 |
| WP_032461047 | 144 | DSTDKADLRLIYLALAHMIKFRGHFLIEGG-LNPDNSDVDKL--FIQLVQTYNQL--FEEN-- INASRVDAK---AI | 211 |
| WP_032462016 | 144 | DSTDKADLRLIYLALAHMIKFRGHFLIEGD-LNPDNSDVDKL--FIQLVQTYNQL--FEEN-- INANGVDAK---AI | 211 |
| WP_032462936 | 144 | DSTDKADLRLIYLALAHMIKFRGHFLIEGD-LNPDNSDVDKL--FIQLVQTYNQL--FEEN-- INASRVDAK---AI | 211 |
| WP_032464890 | 144 | DSTDKADLRLIYLALAHMIKFRGHFLIEGD-LNPDNSDVDKL--FIQLVQTYNQL--FEEN-- INASGVDAK---AI | 211 |
| WP_033888930 | 1 | ---------------------------------PDNSDVDKL--FIQLVQTYNQL--FEEN-- INASGVDAK---AI | 36 |
| WP_038431314 | 144 | DSTDKADLRLIYLALAHMIKFRGHFLIEGD-LNPDNSDVDKL--FIQLVQTYNQL--FEEN-- INASRVDAK---AI | 211 |
| WP_038432938 | 144 | DSTDKVDLRLIYLALAHMIKFRGHFLIEGD-LNPDNSDVDKL--FIQLVQTYNQL--FEEN-- INASRVDAK---AI | 211 |
| WP_038434062 | 144 | DSTDKADLRLIYLALAHMIKFRGHFLIEGD-LNPDNSDVDKL--FIQLVQTYNQL--FEEN-- INASRVDAK---AI | 211 |
| BAQ51233 | 55 | DSTDKADLRLIYLALAHMIKFRGHFLIEGD-LNPDNSDVDKL--FIQLVQTYNQL--FEEN-- INASGVDAK---AI | 122 |
| KGE60162 | | --------------------------------------------------------------- -------------- | |
| KGE60856 | | --------------------------------------------------------------- -------------- | |
| WP_002989955 | 144 | DSTDKADLRLIYLALAHMIKFRGHFLIEGD-LNPDNSDVDKL--FIQLVQTYNQL--FEEN-- INASGVDAK---AI | 211 |
| WP_003030002 | 144 | DISQKADLRLVYLALAHMIKFRGHFLIEGQ-LKAENTNVQAL--FKDFVEVYDKT--VEES-H LSEMTVDAL---SI | 211 |
| WP_003065552 | 147 | DSSEKADLRLVYLALAHMIKFRGHFLIEGE-LNAENTDVQKI--FADFVGVYDRT--FDDS-H LSEITVDAA---SI | 214 |
| WP_001040076 | 144 | DKKEKADLRLVYLALAHIIKFRGHFLIEDDrFDVRNIDIQKQ--YQAFLEIFDTT--FENN-D LLSQDVDVE---AI | 212 |
| WP_001040078 | 144 | DKQEKADLRLIYLALAHIIKFRGHFLIEDDrFDVRNIDIQKQ--YQAFLEIFDTT--FENN-H LLSQNVDVE---AI | 212 |
| WP_001040080 | 144 | DKKEKADLRLIYIALAHIIKFRGHFLIEDDsFDVRNIDISKQ--YQDFLEIFNIT--FENN-D LLSQNVDVE---AI | 212 |
| WP_001040081 | 144 | DKKEKADLRLIYIALAHIIKFRGHFLIEDDsFDVRNIDISKQ--YQDFLEIFNTI--FENN-D LLSQNVDVE---AI | 212 |
| WP_001040083 | 144 | DKKEKADLRLIYIALAHIIKFRGHFLIEDDsFDVRNIDISKQ--YQDFLEIFNIT--FENN-D LLSQNVDVE---AI | 212 |
| WP_001040085 | 144 | DKKEKADLRLIYIALAHIIKFRGHFLIEDDsFDVRNIDISKQ--YQDFLEIFNIT--FENN-D LLSQNVDVE---AI | 212 |
| WP_001040087 | 144 | DKKEKADLRLIYIALAHIIKFRGHFLIEDDsFDVRNIDISKQ--YQDFLEIFNIT--FENN-D LLSQNVDVE---AI | 212 |
| WP_001040088 | 144 | DKKEKADLRLIYIALAHIIKFRGHFLIEDDsFDVRNIDISKQ--YQDFLEIFNIT--FENN-D LLSQNVDVE---AI | 212 |
| WP_001040089 | 144 | DKKEKADLRLIYIALAHIIKFRGHFLIEDDsFDVRNIDISKQ--YQDFLEIFNIT--FENN-D LLSQNVDVE---AI | 212 |
| WP_001040090 | 144 | DKKEKADLRLIYIALAHIIKFRGHFLIEDDsFDVRNIDISKQ--YQDFLEIFNIT--FENN-D LLSQNVDVE---AI | 212 |
| WP_001040091 | 144 | DKKEKADLRLIYIALAHIIKFRGHFLIEDDsFDVRNIDISKQ--YQDFLEIFNIT--FENN-D LLSQNVDVE---AI | 212 |
| WP_001040092 | 144 | DKKEKADLRLVYLALAHIIKFRGHFLIEDDrFDVRNIDIQKQ--YQAFLEIFDTS--FENN-H LLSQNVDVE---AI | 212 |
| WP_001040094 | 144 | DKKEKADLRLIYLALAHIIKFRGHFLIEDDrFDVRNIDIQKQ--YQAFLEIFDTT--FENN-D LLSQNVDVE---AI | 212 |
| WP_001040095 | 144 | DKKEKADLRLIYLALAHIIKFRGHFLIEDDrFDVRNIDIQKQ--YQAFLEIFDTT--FENN-D LLSQNVDVE---AI | 212 |
| WP_001040096 | 144 | DKKEKADLRLIYLALAHIIKFRGHFLIEDDrFDVRNIDIQKQ--YQAFLEIFDTT--FENN-D LLSQNVDVE---AI | 212 |
| WP_001040097 | 144 | DKKEKADLRLIYLALAHIIKFRGHFLIEDDrFDVRNIDIQKQ--YQAFLEIFDTT--FENN-D LLSQNVDVE---AI | 212 |
| WP_001040098 | 144 | DKKEKADLRLIYLALAHIIKFRGHFLIEDDrFDVRNIDIQKQ--YQAFLEIFDTT--FENN-D LLSQNVDVE---AI | 212 |
| WP_001040099 | 144 | DKKEKADLRLIYLALAHIIKFRGHFLIEDDrFDVRNIDIQKQ--YQAFLEIFDTT--FENN-D LLSQNVDVE---AI | 212 |
| WP_001040100 | 144 | DKKEKADLRLIYLALAHIIKFRGHFLIEDDrFDVRNIDIQKQ--YQAFLEIFDTT--FENN-D LLSQNVDVE---AI | 212 |
| WP_001040104 | 144 | DKKEKADLRLIYIALAHIIKFRGHFLIEDDsFDVRNIDISKQ--YQDFLEIFNIT--FENN-D LLSQNVDVE---AI | 212 |
| WP_001040105 | 144 | DKKEKADLRLIYIALAHIIKFRGHFLIEDDsFDVRNIDISKQ--YQDFLEIFNIT--FENN-D LLSQNVDVE---AI | 212 |
| WP_001040106 | 144 | DKKEKANLRLVYLALAHIIKFRGHFLIEDDsFDVRNIDIQRQ--YQAFLEIFDTT--FENN-H LLSQNIDVE---GI | 212 |
| WP_001040107 | 144 | DKKEKADLRLVYLALAHIIKFRGHFLIEDDsFDVRNIDIQRQ--YQAFLEIFDTT--FENN-H LLSQNIDVE---GI | 212 |
| WP_001040108 | 144 | DKKEKADLRLVYLALAHIIKFRGHFLIEDDsFDVRNIDIQRQ--YQAFLEIFDTT--FENN-H LLSQNIDVE---GI | 212 |
| WP_001040109 | 144 | DKKEKANLRLVYLALAHIIKFRGHFLIEDDsFDVRNIDIQRQ--YQAFLEIFDTT--FENN-H LLSQNIDVE---GI | 212 |
| WP_001040110 | 144 | DKKEKANLRLVYLALAHIIKFRGHFLIEDDsFDVRNIDIQRQ--YQAFLEIFDTT--FENN-H LLSQNIDVE---GI | 212 |
| WP_015058523 | 144 | DKKEKADLRLVYLALAHIIKFRGHFLIEDDrFDVRNIDIQKQ--YQAFLEIFDTS--FENN-H LLSQNVDVE---AI | 212 |
| WP_017643650 | 144 | DKKEKADLRLIYLALAHIIKFRGHFLIEDDrFDVRNIDIQKQ--YQAFLEIFDTT--FENN-D LLSQNVDVE---AI | 212 |
| WP_017647151 | 144 | DKKEKADLRLFYLALAHIIKFRGHFLIEDDsFDVRNIDIQRQ--YQAFLEIFDTT--FENN-H LLSQNIDIE---GI | 212 |
| WP_017648376 | 144 | DKKEKADLRLFYLALAHIIKFRGHFLIEDDsFDVRNIDIQRQ--YQAFLEIFDTT--FENN-H LLSQNIDVE---GI | 212 |
| WP_017649527 | 144 | DKKEKADLRLIYIALAHIIKFRGHFLIEDDsFDVRNIDISKQ--YQDFLEIFNIT--FENN-D LLSQNVDVE---AI | 212 |
| WP_017771611 | 144 | DKKEKADLRLVYLALAHIIKFRGHFLIEDDsFDVRNIDIQRQ--YQAFLEIFDTT--FENN-H LLSQNIDVE---GI | 212 |
| WP_017771984 | 144 | DKKEKADLRLIYIALAHIIKFRGHFLIEDDsFDVRNIDISKQ--YQDFLEIFNIT--FENN-D LLSQNVDVE---AI | 212 |
| CFQ25032 | 144 | DKKEKADLRLIYIALAHIIKFRGHFLIEDDsFDVRNIDISKQ--YQDFLEIFNIT--FENN-D LLSQNVDVE---AI | 212 |
| CFV16040 | 144 | DKKEKADLRLIYIALAHIIKFRGHFLIEDDsFDVRNIDISKQ--YQDFLEIFNIT--FENN-D LLSQNVDVE---AI | 212 |
| KLJ37842 | 144 | DKKEKADLRLIYIALAHIIKFRGHFLIEDDsFDVRNIDISKQ--YQDFLEIFNIT--FENN-D LLSQNVDVE---AI | 212 |
| KLJ72361 | 144 | DKKEKADLRLIYIALAHIIKFRGHFLIEDDsFDVRNIDISKQ--YQDFLEIFNIT--FENN-D LLSQNVDVE---AI | 212 |
| KLL20707 | 144 | DKKEKADLRLIYIALAHIIKFRGHFLIEDDsFDVRNIDISKQ--YQDFLEIFNIT--FENN-D LLSQNVDVE---AI | 212 |
| KLL42645 | 144 | DKKEKANLRLVYLALAHIIKFRGHFLIEDDsFDVRNIDIQRQ--YQAFLEIFDTT--FENN-H LLSQNIDVE---GI | 212 |
| WP_047207273 | 144 | DKKEKADLRLIYIALAHIIKFRGHFLIEDDsFDVRNIDISKQ--YQDFLEIFNIT--FENN-D LLSQNVDVE---AI | 212 |
| WP_047209694 | 144 | DKKEKADLRLIYLALAHIIKFRGHFLIEDDsFDVRNIDIQKQ--YQAFLEIFDTT--FENN-D LLSQNVDVE---AI | 212 |
| WP_050198062 | 144 | DKKEKADLRLIYIALAHIIKFRGHFLIEDDsFDVRNIDISKQ--YQDFLEIFNIT--FENN-D LLSQNVDVE---AI | 212 |
| WP_050201642 | 144 | DKKEKADLRLIYIALAHIIKFRGHFLIEDDsFDVRNIDISKQ--YQDFLEIFNIT--FENN-D LLSQNVDVE---AI | 212 |
| WP_050204027 | 144 | DKKEKANLRLVYLALAHIIKFRGHFLIEDDsFDVRNIDIQRQ--YQAFLEIFDTT--FENN-H LLSQNIDVE---GI | 212 |
| WP_050881965 | 144 | DKKEKADLRLIYIALAHIIKFRGHFLIEDDsFDVRNIDISKQ--YQDFLEIFNIT--FENN-D LLSQNVDVE---AI | 212 |
| WP_050886065 | 144 | DKKEKADLRLIYIALAHIIKFRGHFLIEDDsFDVRNTDISKQ--YQDFLEIENTT--FENN-D LLSQNVDVE---AI | 212 |
| AHN30376 | 144 | DKKEKADLRLVYLALAHIIKFRGHFLIEDDrEDVRNTDIQKQ--YQAFLEIEDTS--FENN-H LLSQNVDVE---AI | 212 |
| EAO78426 | 144 | DKKEKADLRLIYIALAHIIKFRGHFLIEDDsFDVRNTDISKQ--YQDFLEIENTT--FENN-D LLSQNVDVE---AI | 212 |
| CCW42055 | 144 | DKKEKADLRLVYLALAHIIKFRGHFLIEDDrEDVRNTDIQKQ--YQAFLEIFDTT--FENN-H LLSQNVDVE---AI | 212 |
| WP_003041502 | 144 | DISQKADLRLVYLALAHMIKFRGHFLIEGQ-LKAENTNVQAL--FKDFVEVYDKT--VEES-H LSEITVDAL---SI | 211 |
| WP_037593752 | 145 | NSKEKADLRLVYLALAHMIKFRGHFLYEGD-LKAENTDVQAL--FKDFVEEYDKT--IEES-H LSEITVDAL---SI | 212 |
| WP_049516684 | 145 | DISQKADLRLVYLALAHMIKFRGHFLIEGQ-LKAENTNVQAL--FKDFVEVYDKT--VEES-H LSEMTVDAL---SI | 212 |
| GAD46167 | 144 | NSKEKADLRLVYLALAHMIKFRGHFLYEGD-LKAENTDVQAL--FKDFVEEYDKT--IEES-H LSEITVDAL---SI | 211 |
| WP_018363470 | 145 | DSTEKADLRLVYLALAHMIKERGHFLIEGE-LNAENTDVQKL--FTDEVGVYDRT--FDDS-H LSEITVDAA---SI | 212 |
| WP_003043819 | 144 | DSPEKADLRLIYLALAHIIKFRGHFLIEGK-LNAENSDVAKL--FYQLIQTYNQL--FEES-- LDEIEVDAK---GI | 211 |
| WP_006269658 | 144 | DTSKKADLRLVYLALAHMIKFRGHFLYEGD-LKAENTDVQAL--FKDFVEEYDKT--IEES-H LSEITVDAL---SI | 211 |
| WP_048800889 | 144 | DSTGKVDLRLVYLALAHMIKFRGHFLIEGQ-LKAENTDVQTL--ENDEVEVYDKT--IEES-H LAEITVDAL---SI | 211 |
| WP_012767106 | 144 | DSTDKADLRLIYLALAHMIKFRGHFLIEGD-LNPDNSDMDKL--FIQLVQTYNQL--FEEN-- INASRVDAK---AI | 211 |
| WP_014612333 | 144 | DSTDKADLRLIYLALAHMIKFRGHFLIEGD-LNPDNSDVDKL--FIQLVQTYNQL--FEEK-- INASGVDAK---AI | 211 |
| WP_015017095 | 144 | DSTDKADLRLIYLALAHMIKFRGHFLIEGD-LNPDNSDMDKL--FIQLVQTYNQL--FEEN-- INASRVDAK---AI | 211 |
| WP_015057649 | 144 | DSTDKADLRLIYLALAHMIKFRGHFLIEGD-LNPDNSDMDKL--FIQLVQTYNQL--FEEN-- INASRVDAK---AI | 211 |
| WP_048327215 | 144 | DSTDKADLRLIYLALAHMIKFRGHFLIEGD-LNPDNSDMDKL--FIQLVQTYNQL--FEEN-- INASRVDAK---AI | 211 |
| WP_049519324 | 144 | DSTDKADLRLIYLALAHMIKFRGHFLIEGD-LNPDNSDVDKL--FIQLVQTYNQL--FEEN-- INASRVDAK---AI | 211 |
| WP_012515931 | 144 | DNPQKADLRLIYLAVAHIIKFRGHFLIEGT-LSSKNNNLQKS--FDHLVDTYNLL--FEEQ-- LLTEGINAK---EL | 211 |
| WP_021320964 | 144 | DNPQKADLRLIYLAVAHIIKFRGHFLIEGT-LSSKNNNLQKS--FDHLVDTYNLL--FEEQ-- LLTEGINAK---EL | 211 |
| WP_037581760 | 144 | DNPQKADLRLIYLAVAHIIKFRGHFLIEGT-LSSKNNNLQKS--FDHLVDTYNLL--FEEQ-- LLTEGINAK---EL | 211 |
| WP_004232481 | 144 | DSPEKVDLRLVYLALAHMIKFRGHFLIEGQ-LNAENTDVQKI--FADFVGVYDRT--FDDS-H LSEITVDAA---SI | 211 |
| WP_009854540 | 145 | DSSEKADLRLVYLALAHMIKYRGHFLIEGK-LNAENTDVQKL--FTDEVGVYDRT--FDDS-H LSEITVDVA---ST | 212 |
| WP_012962174 | 145 | DSHEKADLRLIYLALAHMIKFRGHFLIEGE-LNAENTDVQKL--FEAFVEVYDRT--FDDS-N LSEITVDAS---SI | 212 |
| WP_039695303 | 145 | DSSEKADLRLVYLALAHMIKFRGHFLIEGE-LNAENTDVQKI--FADFVGVYNRT--FDDS-H LSEITVDVA---SI | 212 |
| WP_014334983 | 144 | DSQEKADLRLVYLALAHMIKYRGHFLIEGE-LNAENTDVQKL--ENVEVETYDKI--VDES-H LSEIEVDAS---SI | 211 |
| WP_003099269 | 144 | DSDQKADLRLIYLALAHIIKFRGHFLIEGN-LDSENTDVHVL--FLNLVNIYNNL--FEED-- VETASIDAE---KI | 211 |
| AHY15608 | 144 | DSDQKADLRLIYLALAHIIKFRGHFLIEGN-LDSENTDVHVL--FLNLVNIYNNL--FEED-- VETASIDAE---KI | 211 |
| AHY17476 | 144 | DSDQKADLRLIYLALAHIIKFRGHFLIEGN-LDSENTDVHVL--FLNLVNIYNNL--FEED-- VETASIDAE---KI | 211 |
| ESR09100 | | --------------------------------------------------------------- -------------- | |
| AGM98575 | 144 | DSDQKADLRLIYLALAHIIKFRGHFLIEGN-LDSENTDVHVL--FLNLVNIYNNL--FEED-- VETASIDAE---KI | 211 |
| ALF27331 | 144 | DNPEKTDLRLVYLALAHIIKFRGHFLIEGK-FDTRNNDVQRL--FQEFLAVYDNT--FENS-S LQEQNVQVE---EI | 211 |
| WP_018372492 | 144 | DTPDKMDIRLIYLALAHIIKYRGHFLIEGD-LDIENIGIQDS--FKSFIEEYNTQ--FGTK-- -LDSTTKVE---AI | 209 |
| WP_045618028 | 145 | DSKEKADFRLIYLALAHIIKYRGHFLYEES-FDIKNNDIQKI--FNEFISIYDNT--EEGS-S LNGQNAQVE---AI | 212 |
| WP_045635197 | 144 | DSKEKTDLRLIYLALAHMIKYRGHFLYEEA-FDIKNNDIQKI--FNEFISIYDNT--EEGS-S LSGQNAQVE---AI | 211 |
| WP_002263549 | 144 | DNPEKVDLRLVYLALAHIIKFRGHFLIEGK-FDTRNNDVQRL--FQEFLAVYDNT--FENS-S LQEQNVQVE---EI | 211 |
| WP_002263887 | 144 | DNPEKVDLRLVYLALAHIIKFRGHFLIEGK-FDTRNNDVQRL--FQEFLAVYDNT--FENS-S LQEQNVQVE---EI | 211 |
| WP_002264920 | 144 | DSTEKADLRLVYLALAHMIKFRGHFLIEGE-LNAENTDVQKL--FADFVGVYDRT--FDDS-H LSEITVDAS---SI | 211 |
| WP_002269043 | 144 | DNPEKTDLRLVYLALAHIIKFRGHFLIEGK-FDTRNNDVQRL--FQEFLAVYDNT--FENS-S LQEQNVQVE---EI | 211 |
| WP_002269448 | 144 | DNPEKVDLRLVYLALAHIIKFRGHFLIEGK-FDTRNNDVQRL--FQEFLAVYDNT--FENS-S LQEQNVQVE---EI | 211 |
| WP_002271977 | 144 | DNPEKVDLRLVYLALAHIIKFRGHFLIEGK-FDTRNNDVQRL--FQEFLAVYDNT--FENS-S LQEQNVQVE---EI | 211 |
| WP_002272766 | 144 | DNPEKVDLRLVYLALAHIIKFRGHFLIEGK-FDTRNNDVQRL--FQEFLAVYDNT--FENS-S LQEQNVQVE---EI | 211 |
| WP_002273241 | 144 | DNPEKVDLRLVYLALAHIIKFRGHFLIEGK-FDTRNNDVQRL--FQEFLAVYDNT--FENS-S LQEQNVQVE---EI | 211 |
| WP_002275430 | 144 | DNPEKVDLRLVYLALAHIIKFRGHFLIEGK-FDTRNNDVQRL--FQEFLAVYDNT--FENS-S LQEQNVQVE---EI | 211 |
| WP_002276448 | 144 | DNPEKVDLRLVYLALAHIIKFRGHFLIEGK-FDTRNNDVQRL--FQEFLAVYDNT--FENS-S LQEQNVQVE---EI | 211 |
| WP_002277050 | 144 | DSTEKADLRLVYLALAHMIKFRGHFLIEGE-LNAENTDVQKL--FADFVGVYDRT--FDDS-H LSEITVDAS---SI | 211 |
| WP_002277364 | 144 | DNPEKVDLRLVYLALAHIIKFRGHFLIEGK-FDTRNNDVQRL--FQEFLAVYDNT--FENS-S LQEQNVQVE---EI | 211 |
| WP_002279025 | 144 | DNPEKVDLRLVYLALAHIIKFRGHFLIEGK-FDTRNNDVQRL--FQEFLAVYDNT--FENS-S LQEQNVQVE---EI | 211 |
| WP_002279859 | 144 | DSTEKADLRLVYLALAHMIKFRGHFLIEGE-LNAENTDVQKL--FADFVGVYDRT--FDDS-H LSEITVDAS---SI | 211 |
| WP_002280230 | 144 | DNPEKVDLRLVYLALAHIIKFRGHFLIEGK-FDTRNNDVQRL--FQEFLAVYDNT--FENS-S LQEQNVQVE---EI | 211 |
| WP_002281696 | 144 | DNPEKVDLRLVYLALAHIIKFRGHFLIEGK-FDTRNNDVQRL--FQEFLAVYDNT--FENS-S LQEQNVQVE---EI | 211 |
| WP_002282247 | 144 | DSTEKADLRLVYLALAHMIKFRGHFLIEGE-LNAENTDVQKL--FADFVGVYDRT--FDDS-H LSEITVDAS---SI | 211 |
| WP_002282906 | 144 | DNPEKVDLRLVYLALAHIIKFRGHFLIEGK-FDTRNNDVQRL--FQEFLAVYDNT--FENS-S LQEQNVQVE---EI | 211 |
| WP_002283846 | 144 | DNPEKTDLRLVYLALAHIIKFRGHFLIEGK-FDTRNNDVQRL--FQEFLAVYDNT--FENS-S LQEQNVQVE---EI | 211 |
| WP_002287255 | 144 | DNPEKVDLRLVYLALAHIIKFRGHFLIEGK-FDTRNNDVQRL--FQEFLAVYDNT--FENS-S LQEQNVQVE---EI | 211 |
| WP_002288990 | 144 | DNPEKTDLRLVYLALAHIIKFRGHFLIEGK-FDTRNNDVQRL--FQEFLAVYDNT--FENS-S LQEQNVQVE---EI | 211 |
| WP_002289641 | 144 | DNPEKTDLRLVYLALAHIIKFRGHFLIEGK-FDTRNNDVQRL--FQEFLAVYDNT--FENS-S LQEQNVQVE---EI | 211 |
| WP_002290427 | 144 | DNPEKTDLRLVYLALAHIIKFRGHFLIEGK-FDTRNNDVQRL--FQEFLAVYDNT--FENS-S LQEQNVQVE---EI | 211 |
| WP_002295753 | 144 | DNPEKVDLRLVYLALAHIIKFRGHFLIEGK-FDTRNNDVQRL--FQEFLAVYDNT--FENS-S LQEQNVQVE---EI | 211 |
| WP_002296423 | 144 | DNPEKTDLRLVYLALAHIIKFGGHFLIEGK-FDTRNNDVQRL--FQEFLAVYDNT--FENS-S LQEQNVQVE---EI | 211 |
| WP_002304487 | 144 | NSTEKADLRLVYLSLAHMIKFRGHFLIEGQ-LKAENTNVQAL--FKDFVEVYDKT--VEES-H LSEMTVDAL---SI | 211 |
| WP_002305844 | 144 | DNPEKVDLRLVYLALAHIIKFRGHFLIEGK-FDTRNNDVQRL--FQEFLAVYDNT--FENS-S LQEQNVQVE---EI | 211 |
| WP_002307203 | 144 | DNPEKVDLRLVYLALAHIIKFRGHFLIEGK-FDTRNNDVQKL--FQEFLAVYDNT--FENS-S LQEQNVQVE---EI | 211 |
| WP_002310390 | 144 | DNPEKTDLRLVYLALAHIIKFRGHFLIEGK-FDTRNNDVQRL--FQEFLAVYDNT--FENS-S LQEQNVQVE---EI | 211 |
| WP_002352408 | 144 | DNPEKTDLRLVYLALAHIIKFRGHFLIEGK-FDTRNNDVQRL--FQEFLAVYDNT--FENS-S LQEQNVQVE---EI | 211 |
| WP_012997688 | 144 | DNPEKVDLRLVYLALAHIIKFRGHFLIEGK-FDTRNNDVQRL--FQEFLAVYDNT--FENS-S LQEQNVQVE---EI | 211 |
| WP_014677909 | 144 | DNPEKTDLRLVYLALAHIIKFRGHFLIEGK-FDTRNNDVQRL--FQEFLAVYDNT--FENS-S LQEQNVQVE---EI | 211 |
| WP_019312892 | 144 | DNPEKVDLRLVYLALAHIIKFRGHFLIEGK-FDTRNNDVQRL--FQEFLAVYDNT--FENS-S LQEQNVQVE---EI | 211 |
| WP_019313659 | 144 | DNPEKVDLRLVYLALAHIIKFRGHFLIEGK-FDTRNNDVQRL--FQEFLAVYDNT--FENS-S LQEQNVQVE---EI | 211 |
| WP_019314093 | 144 | DNPEKVDLRLVYLALAHIIKFRGHFLIEGK-FDTRNNDVQKL--FQEFLAVYDNT--FENS-S LQEQNVQVE---EI | 211 |
| WP_019315370 | 144 | DNPEKTDLRLVYLALAHIIKFRGHFLIEGK-FDTRNNDVQRL--FQEFLAVYDNT--FENS-S LQEQNVQVE---EI | 211 |
| WP_019803776 | 144 | DNPEKVDLRLVYLALAHIIKFRGHFLIEGK-FDTRNNDVQRL--FQEFLAVYDNT--FENS-S LQEQNVQVE---EI | 211 |
| WP_019805234 | 144 | DNPEKTDLRLVYLALAHIIKFRGHFLIEGK-FDTRNNDVQRL--FQEFLAVYDNT--FENS-S LQEQNVQVE---EI | 211 |
| WP_024783594 | 144 | DNPEKVDLRLVYLALAHIIKFRGHFLIEGK-FDTRNNDVQRL--FQEFLAVYDNT--FENS-S LQEQNVQVE---EI | 211 |
| WP_024784288 | 144 | DSTEKADLRLVYLALAHMIKFRGHFLIEGE-LNAENTDVQKL--FADFVGVYDRT--FDDS-H LSEITVDAS---SI | 211 |
| WP_024784666 | 144 | DNPEKVDLRLVYLALAHIIKFRGHFLIEGK-FDTRNNDVQRL--FQEFLAVYDNT--FENS-S LQEQNVQVE---EI | 211 |
| WP_024784894 | 144 | DNPEKTDLRLVYLALAHIIKFRGHFLIEGK-FDTRNNDVQRL--FQEFLAVYDNT--FENS-S LQEQNVQVE---EI | 211 |
| WP_024786433 | 144 | DSTEKADLRLVYLALAHMIKFRGHFLIEGE-LNAENTDVQKL--FADFVGVYDRT--FDDS-H LSEITVDAS---SI | 211 |
| WP_049473442 | 144 | DNPEKVDLRLVYLALAHIIKFRGHFLIEGK-FDTRNNDVQRL--FQEFLAVYDNT--FENS-S LQEQNVQVE---EI | 211 |
| WP_049474547 | 144 | DNPEKTDLRLVYLALAHIIKFRGHFLIEGK-FDTRNNDVQRL--FQEFLAVYDNT--FENS-S LQEQNVQVE---EI | 211 |
| EMC03581 | 137 | DNPEKVDLRLVYLALAHIIKFRGHFLIEGK-FDTRNNDVQRL--FQEFLAVYDNT--FENS-S LQEQNVQVE---EI | 204 |
| WP_000428612 | 145 | DSKEKTDLRLIYLALAHMIKYRGHFLYEDT-FDIKNNDIQKI--FNEFISIYNNT--FEGN-S LSGQNVQVE---AI | 212 |
| WP_000428613 | 145 | DSKEKTDLRLIYLALAHMIKYRGHFLYEDT-FDIKNNDIQKI--FSEFISIYDNT--FEGS-S LSGQNAQVE---AI | 212 |
| WP_049523028 | 144 | DSKEKVDLRLIYLALAHIIKYRGHFLYEDS-FDIKNNDIQKI--FNEFTILYDNT--FEES-S LSKGNAQVE---EI | 211 |
| WP_003107102 | 113 | DSDEKADLRLIYLALAHIIKERGHFLIEGD-LDSQNTDVNAL--FLKLVDTYNLM--FEDD-- IDTQTIDAT---VI | 180 |
| WP_054279288 | 146 | DNTEKADLRLIYLALAHIIKFRGHFLIEGA-LSANNTDVQQL--VHALVDAYNIM--FEED-- LDIEAIDVK---AI | 213 |
| WP_049531101 | 145 | DSKEKADLRLIYLTLAHMIKYRGHFLYEES-FDIKNNDIQKI--FNEFISIYDNT--FEGS-S LSGQNAQVE---AI | 212 |
| WP_049538452 | 145 | DSKEKADLRLIYLALAHMIKYRGHFLYEEA-FDIKNNDIQKI--FNEFINIYDNT--FEGS-S LSGQNEQVE---AI | 212 |
| WP_049549711 | 145 | DSKEKADLRLIYLVLAHMIKYRGHFLYEEA-FDIKNNDIQKI--FNEFISIYDNT--FEGS-S LSGQNAQVE---TI | 212 |
| WP_007896501 | 146 | DRDQKADLRLIYLALSHIIKFRGHFLIEGK-LNSENTDVQKL--FIALVIVYNLL--FEEE-- IAGETCDAK---AL | 213 |
| EFR44625 | 98 | DRDQKADLRLIYLALSHIIKFRGHFLIEGK-LNSENTDVQKL--FIALVIVYNLL--FEEE-- IAGETCDAK---AL | 165 |
| WP_002897477 | 144 | DSKEKSDVRLIYLALAHMIKYRGHFLYEET-FDIKNNDIQKI--FNEFINIYDNT--FEGS-S LSGQNAQVE---AI | 211 |
| WP_002906454 | 144 | DSKEKTDLRLIYLALAHMIKYRGHFLYEES-FDIKNNDIQKI--FNEFISIYDNT--FEGS-S LSGQNAQVE---AI | 211 |
| WP_009729476 | 145 | DSKEKTDLRLIYLALAHMIKYRGHFLYEEA-FDIKNNDIQKI--FNEFISIYNNT--FEGN-S LSGQNVQVE---AI | 212 |
| CQR24647 | 144 | DSSEKADLRLVYLALAHIIKYRGHFLIDEP-IDIRNMNSQNL--FKEFLLAFDGI--QVDC-Y LASKHTDIS---GI | 211 |
| WP_000066813 | 145 | DSKEKTDLRLIYLALAHMIKYRGHFLYEES-FDIKNNDIQKI--FSEFISIYDNT--FEGK-S LSGQNAQVE---AI | 212 |
| WP_009754323 | 145 | DSKEKADLRLIYLALAHITKYRGHFLYEEA-FDIKNNDIQKI--FNEFINIYDNT--FEGS-S LSGQNAQVE---AI | 212 |
| WP_044674937 | 144 | DSSQKADIRLIYLALAHIIKYRGHFLFEGD-LKSENKDVQHL--FNDFVEMFDKT--VEGS-Y LSENLPNVA---DV | 211 |
| WP_044676715 | 144 | DSSQKADIRLIYLALAHIIKYRGHFLFEGD-LKSENKDVQHL--FNDFVEMFDKT--VEGS-Y LSENLPNVA---DV | 211 |
| WP_044680361 | 144 | DSSQKADIRLIYLALAHIIKYRGHFLFEGD-LKSENKDVQHL--FNDFVEMFDKT--VEGS-Y LSENLPNVA---DV | 211 |
| WP_044681799 | 144 | DSSQKADIRLIYLALAHIIKYRGHFLFEGD-LKSENKDVQHL--FNDFVEMFDKT--VEGS-Y LSENLPNVA---DV | 211 |
| WP_049533112 | 144 | DISQKADLRLVYLALAHMIKFRGHFLIEGQ-LKAENTNVQAL--FKDFVEVYDKT--VEES-H LSEMTVDAL---SI | 211 |
| WP_029090905 | 101 | SQHRQFDIREVYLAIHHLIKYRGHFIYEDQtFTIDGNQLQHH--IKAIITMINSTl---NR-- IIPETIDINvfeKI | 171 |
| WP_006506696 | 140 | ESTEKADPRLIYLALHHIVKYRGNFLYEGQkFNMDASNIEDK--LSDIFTQFTSFnnIPYEdD --KKNLEIL---EI | 210 |
| AIT42264 | 144 | DSTDKADLRLIYLALAHMIKFRGHFLIEGD-LNPDNSDVDKL--FIQLVQTYNQL--FEEN-- INASGVDAK---AI | 211 |
| WP_034440723 | 143 | DSNQKADLRLIYLALAHMIKYRGHFLIEGD-LKMDGISISES--FQEFIDSYNEVcaLEDE-N NDELLTQIE---NI | 217 |
| AKQ21048 | 144 | DSTDKADLRLIYLALAHMIKFRGHFLIEGD-LNPDNSDVDKL--FIQLVQTYNQL--FEEN-- INASGVDAK---AI | 211 |
| WP_004636532 | 144 | DNPEKADLRLVYTALAHIVKYRGHFLIEGE-LNTENTSISET--FEQFLDTYSDI--FKEQ-- LVGDISKVE---EI | 210 |
| WP_002364836 | 144 | DSSEQADLRLIYLALAHIVKYRGHFLIEGK-LSTENISVKEQ--FQQFMIIYNQT--FVNGeS PLPESVLIE---EE | 217 |
| WP_016631044 | 95 | DSSEQADLRLIYLALAHIVKYRGHFLIEGK-LSTENTSVKDQ--FQQFMVIYNQT--FVNGeS PLPESVLIE---EE | 168 |
| EMS75795 | | --------------------------------------------------------------- -------------- | |
| WP_002373311 | 144 | DSSEQADLRLIYLALAHIVKYRGHFLIEGK-LSTENTSVKEQ--FQQFMVIYNQT--FVNGeS PLPESVLIE---EE | 217 |
| WP_002378009 | 144 | DSSEQADLRLIYLALAHIVKYRGHFLIEGK-LSTENISVKEQ--FQQFMIIYNQT--FVNGeS PLPESVLIE---EE | 217 |
| WP_002407324 | 144 | DSSEQADLRLIYLALAHIVKYRGHFLIEGK-LSTENISVKEQ--FQQFMIIYNQT--FVNGeS PLPESVLIE---EE | 217 |
| WP_002413717 | 144 | DSSEQADLRLIYLALAHIVKYRGHFLIEGK-LSTENISVKEQ--FQQFMIIYNQT--FVNGeS PLPESVLIE---EE | 217 |
| WP_010775580 | 144 | DSSEQADLRLIYLALAHIVKYRGHFLIEGK-LSTENISVKEQ--FQQFMIIYNQT--FVNGeS PLPESVLIE---EE | 217 |
| WP_010818269 | 144 | DSSEQADLRLIYLALAHIVKYRGHFLIEGK-LSTENISVKEQ--FQQFMIIYNQT--FVNGeS PLPESVLIE---EE | 217 |
| WP_010824395 | 144 | DSSEQADLRLIYLALAHIVKYRGHFLIEGK-LSTENTSVKDQ--FQQFMVIYNQT--FVNGeS PLPESVLIE---EE | 217 |
| WP_016622645 | 144 | DSSEQADLRLIYLALAHIVKYRGHFLIEGK-LSTENISVKEK--FQQFMIIYNQT--FVNGeG PLPESVLIE---EE | 217 |
| WP_033624816 | 144 | DSSEQADLRLIYLALAHIVKYRGHFLIEGK-LSTENISVKDQ--FQQFMVIYNQT--FVNGeS PLPESVLIE---EE | 217 |
| WP_033625576 | 144 | DSSEQADLRLIYLALAHIVKYRGHFLIEGK-LSTENISVKEQ--FQQFMIIYNQT--FVNGeS PLPESVLIE---EE | 217 |
| WP_033789179 | 144 | DSSEQADLRLIYLALAHIVKYRGHFLIEGK-LSTENISVKEQ--FQQFMIIYNQT--FVNGeS PLPESVLIE---EE | 217 |
| WP_002310644 | 144 | DSSEKADIRLVYLAMAHLLKYRGHFLIEGE-LNTENSSVIET--FRQFLSTYNQQ--FSEA-D KLDEAVDCS---FV | 216 |
| WP_002312694 | 144 | DSSEKADIRLVYLAMAHLLKYRGHFLIEGE-LNTENSSVIET--FRQFLSTYNQQ--FSEA-G KLDEAVDCS---FV | 216 |
| WP_002314015 | 144 | DSSEKADIRLVYLAMAHLLKYRGHFLIEGE-LNTENSSVIET--FRQFLSTYNQQ--FSEA-D KLDEAVDCS---FV | 216 |
| WP_002320716 | 144 | DSSEKADIRLVYLAMAHLLKYRGHFLIEGE-LNTENSSVIET--FRQFLSTYNQQ--FSEA-D KLDEAVDCS---FV | 216 |
| WP_002330729 | 144 | DSSEKADIRLVYLAMAHLLKYRGHFLIEGE-LNTENSSVIET--FRQFLSTYNQQ--FSEA-D KLDEAVDCS---FV | 216 |
| WP_002335161 | 144 | DSSEKADIRLVYLAMAHLLKYRGHFLIEGE-LNTENSSVIET--FRQFLSTYNQQ--FSEA-D KLDEAVDCS---FV | 216 |
| WP_002345439 | 144 | DSSEKADIRLVYLAMAHLLKYRGHFLIEGE-LNTENSSVIET--FRQFLSTYNQQ--FSEA-D KLDEAVDCS---FV | 216 |
| WP_034867970 | 144 | DSTEKEDLRLVYLALAHLLKYRGHFLFEGD-LDTENTSIEES--FRVFLEQYSKQ--SDQP-- -LIVHQPVL---TI | 209 |
| WP_047937432 | 144 | DSSEKADIRLVYLAMAHLLKYRGHFLIEGE-LNTENSSVIET--FRQFLSTYNQQ--FSEA-D KLDEAVDCS---FV | 216 |
| WP_010720994 | 144 | DSTEKGDLRLVYLALAHLLKYRGHFLFEGD-LDTENTSIEES--FRVFLEQYGKQ--SDQP-- -LIVHQPVL---TI | 209 |
| WP_010737004 | 144 | DSTEKEDLRLVYLALAHLLKYRGHFLFEGD-LDTENTSIEES--FRVFLEQYSKQ--SDQP-- -LIVHQPVL---TI | 209 |
| WP_034700478 | 144 | DSTEKEDLRLVYLALAHLLKYRGHFLFEGD-LDTENTSIEES--FRVFLEQYGKQ--SDQP-- -LIVHQPVL---TI | 209 |
| WP_007209003 | 144 | DGDEKADLRLVYLAIAHIIKFRGNFLIEGE-LNTENNSVIELs--KVFVQLYNQTl-SELE-- FIDESIDFS---EV | 214 |
| WP_023519017 | 144 | NSKEQADIRLVYLAIAHCLKYRGHFLFEGE-LDTENTSVIEN--YQQFLQAYQQF--FPEP-- -IGDLDDAV---PI | 209 |
| WP_010770040 | 144 | DISEQADLRLVYLALAHIVKYRGHFLIEGE-LNTENSSVSET--FRIFIQVYNQI--FRENe- PLAVPDNIE---EL | 212 |
| WP_048604708 | 144 | DAEEKADLRLVYLALAHIIKYRGHFLIEGR-LSTENTSTEET--FKTFLQKYNQT--FN---- PVDETISIG---SI | 208 |
| WP_010750235 | 144 | DSTEKADIRLVYLALAHMIKYRGHFLFEGE-LDTENTSVEET--FKEFIDIYNEQ--FEEG-- -IIFYKDIP---LI | 209 |
| AII16583 | 183 | DSTDKADLRLIYLALAHMIKFRGHFLIEGD-LNPDNSDVDKL--FIQLVQTYNQL--FEEN-- INASGVDAK---AI | 250 |
| WP_029073316 | 145 | ESKEKEDPRLIYLALHHIVKYRGNFLYEGQkFSMDVSNIEDK--MIDVLRQFNEInlFEYVeD --KKIDEVL---NV | 215 |
| WP_031589969 | 145 | ESKEKEDPRLIYLALHHIVKYRGNFLYEGQkFSMDVSNIEDK--MIDVLRQFNEInlFEYVeD --KKIDEVL---NV | 215 |
| KDA45870 | 145 | NNDRPADLRLVYLALAHIIKYRGNELLEGE-IDLRITDINKV--FAEFSETLNEN--SDENlG ----KLDVA---DI | 209 |
| WP_039099354 | 133 | TEKRQFDIREIYLAMHHIVKYRGHFLNEAPvSSEKSSEINLVahFDRLNTIFADL--FSESgF -TDKLAEVK---AL | 206 |
| AKP02966 | 138 | INKNKADIRLVYLALHNILKYRGNFTYEHQkFNISTLNSNLS---KELIELNQQLikYDIS-- -FPDNCDWNhisDI | 208 |
| WP_010991369 | 144 | NSSEKADLRLVYLALAHIIKYRGNFLIEGA-LDTQNTSVDGI--YKQFIQTYNQV--FASGiE KLEDNKDVA---KI | 217 |
| WP_033838504 | 144 | NSSEKADLRLVYLALAHIIKYRGNFLIEGA-LDTQNTSVDGI--YKQFIQTYNQV--FASGiE KLEDNKDVA---KI | 217 |
| EHN60060 | 147 | NSSEKADLRLVYLALAHIIKYRGNFLIEGA-LDTQNTSVDGI--YKQFIQTYNQV--FASGiE KLEDNKDVA---KI | 220 |
| EFR89594 | | --------------------------------------------------------------- -------------- | |
| WP_038409211 | 144 | NSSDKADLRLVYLALAHIIKYRGNFLIEGM-LDTKNTSVDEV--FKQFIQTYNQI--FASDiE RLEENKEVA---EI | 217 |
| EFR95520 | | --------------------------------------------------------------- -------------- | |
| WP_003723650 | 144 | NSSEKADLRLVYLALAHIIKYRGNFLIEGA-LDTKNTSVDEV--YKQFIETYNQV--FMSNiE KVEENIEVA---NI | 217 |
| WP_003727705 | 144 | NSSEKADLRLVYLALAHIIKYRGNFLIEGA-LDTKNTSVDEV--YKQFIQTYNQV--FMSNiE KVEENTEVA---SI | 217 |
| WP_003730785 | 144 | NSSEKADLRLVYLALAHIIKYRGNFLIEGA-LDTKNTSVDEV--YKQFIQTYNQV--FMSNiE KVEENTEVA---SI | 217 |
| WP_003733029 | 144 | DSQKKADLRLVYLALAHIIKYRGHFLIEGA-LDTKNISIDEM--FKQFLQIYNQV--FANDiE KTEKNQEVA---QI | 217 |
| WP_003739838 | 144 | NSSEKADLRLVYLALAHIIKYRGNFLIEGA-LDTKNTSVDGV--YKQFIQTYNQV--FISNiE KMEENTTVA---DI | 217 |
| WP_014601172 | 144 | NSSEKADLRLVYLALAHIIKYRGNFLIEGA-LDTKNTSVDGV--YEQFIQTYNQV--FMSNiE KVEENIEVA---NI | 217 |
| WP_023548323 | 144 | NSSEKADLRLVYLALAHIIKYRGNFLIEGA-LDTKNTSVDGV--YEQFILTYNQV--FMSNiE KVEENIEVA---NI | 217 |
| WP_031665337 | 144 | NSSEKADLRLVYLALAHIIKYRGNFLIEGA-LDTKNTSVDGV--YEQFIQTYNQV--FMSNiE KVEENIEVA---NI | 217 |
| WP_031669209 | 144 | DSQKKADLRLVYLALAHIIKYRGHFLIEGA-LDTKNISIDEM--FKQFLQIYNQV--FANDiE KTEKNQEVA---QI | 217 |
| WP_033920898 | 144 | NSSEKADLRLVYLALAHIIKYRGNFLIEGA-LDTKNTSVDGV--YEQFIQTYNQV--FMSNiE KVEENIEVA---NI | 217 |
| AKI42028 | 147 | NSSEKADLRLVYLALAHIIKYRGNFLIEGA-LDTKNTSVDGV--YEQFIQTYNQV--FMSNiE KVEENIEVA---NI | 220 |
| AKI50529 | 147 | NSSEKADLRLVYLALAHIIKYRGNFLIEGA-LDTKNTSVDGV--YEQFIQTYNQV--FMSNiE KVEENIEVA---NI | 220 |
| EFR83390 | | --------------------------------------------------------------- -------------- | |
| WP_046323366 | 144 | NSSDKADLRLVYLALAHIIKYRGNFLIEGK-LDTKNTSVDEV--FKQFIKTYNQV--FASDiE RIEENNEVA---KI | 217 |
| AKE81011 | 160 | DSTDKADLRLIYLALAHMIKFRGHFLIEGD-LNPDNSDVDKL--FIQLVQTYNQL--FEEN-- INASGVDAK---AI | 227 |
| CUO82355 | 144 | ESTEKADPRLIYLALHHIVKYRGNFLYEGQkFNMDASNIEDK--LSDVFTQFADFnnIPYEdD --KKNLEIL---EI | 214 |
| WP_033162887 | 145 | ENKEKADPRLIYLALHHIVKYRGNFLYEGQsFTMDNSDIEER--LNSAIEKFMSIneFDNRiV --SDINSMI---AV | 215 |
| AGZ01981 | 177 | DSTDKADLRLIYLALAHMIKFRGHFLIEGD-LNPDNSDVDKL--FIQLVQTYNQL--FEEN-- INASGVDAK---AI | 244 |
| AKA60242 | 144 | DSTDKADLRLIYLALAHMIKFRGHFLIEGD-LNPDNSDVDKL--FIQLVQTYNQL--FEEN-- INASGVDAK---AI | 211 |
| AKS40380 | 144 | DSTDKADLRLIYLALAHMIKFRGHFLIEGD-LNPDNSDVDKL--FIQLVQTYNQL--FEEN-- INASGVDAK---AI | 211 |
| 4UN5_B | 148 | DSTDKADLRLIYLALAHMIKFRGHFLIEGD-LNPDNSDVDKL--FIQLVQTYNQL--FEEN-- INASGVDAK---AI | 215 |
| WP_010922251 | 212 | [chemical structure] | 277 |
| WP_039695303 | 213 | LTEK-ISKSRRLENLIKY-Y-PT EKKNTLEGNLIALALGLQPNEKTNE--KLSED-A---KLQ--FSKDTYEEDLEE | 278 |
| WP_045635197 | 212 | FTDK-ISKSAKRERVLKL-F-PD EKSTGLFSEFLKLIVGNQADFKKHF--DLEDK-A---PLQ--FSKDTYDEDLEN | 277 |
| 5AXW_A | 135 | LSTK--------EQISRN-S--K ----------------------------LEEKyVa--ELQ-------------- | 157 |
| WP_009880683 | | ----------------------- ------------------------------------------------------ | |
| WP_010922251 | 212 | LSAR-LSKSRRLENLIAQ-L-PG EKKNGLEGNLIALSLGLIPNEKSNF--DLAED-A---KLQ--LSKDTYDDDLDN | 277 |
| WP_011054416 | 212 | LSAR-LSKSRRLENLIAQ-L-PG EKKNGLEGNLIALSLGLIPNEKSNF--DLAED-A---KLQ--LSKDTYDDDLDN | 277 |
| WP_011284745 | 212 | LSAR-LSKSRRLENLIAQ-L-PG EKKNGLEGNLIALSLGLIPNEKSNF--DLAED-A---KLQ--LSKDTYDDDLDN | 277 |
| WP_011285506 | 212 | LSAR-LSKSRRLENLIAQ-L-PG EKKNGLEGNLIALSLGLIPNEKSNF--DLAED-A---KLQ--LSKDTYDDDLDN | 277 |
| WP_011527619 | 212 | LSAR-LSKSRRLENLIAQ-L-PG EKKNGLEGNLIALSLGLIPNEKSNF--DLAED-A---KLQ--LSKDTYDDDLDN | 277 |
| WP_012560673 | 212 | LSAR-LSKSRRLENLIAQ-L-PG EKRNGLEGNLIALSLGLIPNEKSNF--DLAED-A---KLQ--LSKDTYDDDLDN | 277 |
| WP_014407541 | 212 | LSAR-LSKSRRLENLIAQ-L-PG EKRNGLEGNLIALSLGLIPNEKSNF--DLAED-A---KLQ--LSKDTYDDDLDN | 277 |
| WP_020905136 | 212 | LSAR-LSKSRRLENLIAQ-L-PG EKKNGLEGNLIALSLGLIPNEKSNF--DLAED-A---KLQ--LSKDTYDDDLDN | 277 |
| WP_023080005 | 212 | LSAR-LSKSRRLENLIAQ-L-PG EKKNGLEGNLIALSLGLIPNEKSNF--DLAED-A---KLQ--LSKDTYDDDLDN | 277 |
| WP_023610282 | 212 | LSAR-LSKSRRLENLIAQ-L-PG EKKNGLEGNLIALSLGLIPNEKSNF--DLAED-A---KLQ--LSKDTYDDDLDN | 277 |
| WP_030125963 | 212 | LSAR-LSKSRRLENLIAQ-L-PG EKKNGLEGNLIALSLGLIPNEKSNF--DLAED-A---KLQ--LSKDTYDDDLDN | 277 |
| WP_030126706 | 212 | LSAR-LSKSRRLENLIAQ-L-PG EKKNGLEGNLIALSLGLIPNEKSNF--DLAED-A---KLQ--LSKDTYDDDLDN | 277 |
| WP_031488318 | 212 | LSAR-LSKSRRLENLIAQ-L-PG EKRNGLEGNLIALSLGLIPNEKSNF--DLAED-A---KLQ--LSKDTYDDDLDN | 277 |
| WP_032460140 | 212 | LSAR-LSKSRRLENLIAQ-L-PG EKRNGLEGNLIALSLGLIPNEKSNF--DLAED-A---KLQ--LSKDTYDDDLDN | 277 |
| WP_032461047 | 212 | LSAR-LSKSRRLENLIAQ-L-PG EKRNGLEGNLIALSLGLIPNEKSNF--DLAED-A---KLQ--LSKDTYDDDLDN | 277 |
| WP_032462016 | 212 | LSAR-LSKSRRLENLIAQ-L-PG EKKNGLEGNLIALSLGLIPNEKSNF--DLAED-A---KLQ--LSKDTYDDDLDN | 277 |
| WP_032462936 | 212 | LSAR-LSKSRRLENLIAQ-L-PG EKKNGLEGNLIALLLGLIPNEKSNF--DLAED-A---KLQ--LSKDTYDDDLDN | 277 |
| WP_032464890 | 212 | LSAR-LSKSRRLENLIAQ-L-PG EKKNGLEGNLIALSLGLIPNEKSNF--DLAED-A---KLQ--LSKDTYDDDLDN | 277 |
| WP_033888930 | 37 | LSAR-LSKSRRLENLIAQ-L-PG EKKNGLEGNLIALSLGLIPNEKSNF--DLAED-A---KLQ--LSKDTYDDDLDN | 102 |
| WP_038431314 | 212 | LSAR-LSKSRRLENLIAQ-L-PG EKKNGLEGNLIALSLGLIPNEKSNF--DLAED-A---KLQ--LSKDTYDDDLDN | 277 |
| WP_038432938 | 212 | LSAR-LSKSRRLENLIAQ-L-PG EKKNGLEGNLIALSLGLIPNEKSNF--DLAED-T---KLQ--LSKDTYDDDLDN | 277 |
| WP_038434062 | 212 | LSAR-LSKSRRLENLIAQ-L-PG EKRNGLEGNLIALSLGLIPNEKSNF--DLAED-A---KLQ--LSKDTYDDDLDN | 277 |
| BAQ51233 | 123 | LSAR-LSKSRRLENLIAQ-L-PG EKKNGLEGNLIALSLGLIPNEKSNF--DLAED-A---KLQ--LSKDTYDDDLDN | 188 |
| KGE60162 | | ----------------------- ------------------------------------------------------ | |
| KGE60856 | | ----------------------- ------------------------------------------------------ | |
| WP_002989955 | 212 | LSAR-LSKSRRLENLIAQ-L-PG EKKNGLEGNLIALSLGLIPNEKSNF--DLAED-A---KLQ--LSKDTYDDDLDN | 277 |
| WP_003030002 | 212 | LTEK-VSKSRRLENLIAH-Y-PA EKKNTLEGNLIALSLGLQPNEKTNE--QLSED-A---KLQ--FSKDTYEEDLEG | 277 |
| WP_003065552 | 215 | LTEK-ISKSRRLENLIKY-Y-PT EKKNTLEGNLIALALGLQPNEKMNF--KLSED-A---KLQ--FSKDSYEEDLGE | 280 |
| WP_001040076 | 213 | LTDK-ISKSAKKDRILAQ-Y-PN QKSTGIFAEFLKLIVGNQADFKKHF--NLEDK-T---PLQ--FAKDSYDEDLEN | 278 |
| WP_001040078 | 213 | LTDK-ISKSAKKDRILAQ-Y-PN QKSTGIFAEFLKLIVGNQADFKKHF--NLEDK-T---PLQ--FAKDSYDEDLEN | 278 |
| WP_001040080 | 213 | LTDK-ISKSAKKDRILAQ-Y-PN QKSTGIFAEFLKLIVGNQADFKKYF--NLEDK-T---PLQ--FAKDSYDEDLEN | 278 |
| WP_001040081 | 213 | LTDK-ISKSAKKDRILAQ-Y-PN QKSTGIFAEFLKLIVGNQADFKKYF--NLEDK-T---PLQ--FAKDSYDEDLEN | 278 |
| WP_001040083 | 213 | LTDK-ISKSAKKDRILAQ-Y-PN QKSTGIFAEFLKLIVGNQADFKKYF--NLEDK-T---PLQ--FAKDSYDEDLEN | 278 |
| WP_001040085 | 213 | LTDK-ISKSAKKDRILAQ-Y-PN QKSTGIFAEFLKLIVGNQADFKKYF--NLEDK-T---PLQ--FAKDSYDEDLEN | 278 |
| WP_001040087 | 213 | LTDK-ISKSAKKDRILAQ-Y-PN QKSTGIFAEFLKLIVGNQADFKKYF--NLEDK-T---PLQ--FAKDSYDEDLEN | 278 |
| WP_001040088 | 213 | LTDK-ISKSAKKDRILAQ-Y-PN QKSTGIFAEFLKLIVGNQADFKKYF--NLEDK-T---PLQ--FAKDSYDEDLEN | 278 |
| WP_001040089 | 213 | LTDK-ISKSAKKDRILAQ-Y-PN QKSTGIFAEFLKLIVGNQADFKKYF--NLEDK-T---PLQ--FAKDSYDEDLEN | 278 |
| WP_001040090 | 213 | LTDK-ISKSAKKDRILAQ-Y-PN QKSTGIFAEFLKLIVGNQADFKKYF--NLEDK-T---PLQ--FAKDSYDEDLEN | 278 |
| WP_001040091 | 213 | LTDK-ISKSAKKDRILAQ-Y-PN QKSTGIFAEFLKLIVGNQADFKKYF--NLEDK-T---PLQ--FAKDSYDEDLEN | 278 |
| WP_001040092 | 213 | LTDK-ISKSAKKDRILAQ-Y-PN QKSTGIFAEFLKLIVGNQADFKKHF--NLEDK-T---PLQ--FAKDSYDEDLEN | 278 |
| WP_001040094 | 213 | LTDK-ISKSAKKDRILAR-Y-PN QKSTGIFAEFLKLIVGNQADFKKHF--NLEDK-T---PLQ--FAKDSYDEDLEN | 278 |
| WP_001040095 | 213 | LTDK-ISKSAKKDRILAR-Y-PN QKSTGIFAEFLKLIVGNQADFKKHF--NLEDK-T---PLQ--FAKDSYDEDLEN | 278 |
| WP_001040096 | 213 | LTDK-ISKSAKKDRILAR-Y-PN QKSTGIFAEFLKLIVGNQADFKKHF--NLEDK-T---PLQ--FAKDSYDEDLEN | 278 |
| WP_001040097 | 213 | LTDK-ISKSAKKDRILAR-Y-PN QKSTGIFAEFLKLIVGNQADFKKHF--NLEDK-T---PLQ--FAKDSYDEDLEN | 278 |
| WP_001040098 | 213 | LTDK-ISKSAKKDRILAR-Y-PN QKSTGIFAEFLKLIVGNQADFKKHF--NLEDK-T---PLQ--FAKDSYDEDLEN | 278 |
| WP_001040099 | 213 | LTDK-ISKSAKKDRILAR-Y-PN QKSTGIFAEFLKLIVGNQADFKKHF--NLEDK-T---PLQ--FAKDSYDEDLEN | 278 |
| WP_001040100 | 213 | LTDK-ISKSAKKDRILAR-Y-PN QKSTGIFAEFLKLIVGNQADFKKHF--NLEDK-T---PLQ--FAKDSYDEDLEN | 278 |
| WP_001040104 | 213 | LTDK-ISKSAKKDRILAQ-Y-PN QKSTGIFAEFLKLIVGNQADFKKYF--NLEDK-T---PLQ--FAKDSYDEDLEN | 278 |
| WP_001040105 | 213 | LTDK-ISKSAKKDRILAQ-Y-PN QKSTGIFAEFLKLIVGNQADFKKYF--NLEDK-T---PLQ--FAKDSYDEDLEN | 278 |
| WP_001040106 | 213 | LTDK-ISKSAKKDRILAQ-Y-PN QKSTGIFAEFLKLIVGNQADFKKHF--NLEDK-T---PLQ--FAKDSYDEDLEN | 278 |
| WP_001040107 | 213 | LTDK-ISKSAKKDRILAQ-Y-PN QKSTGIFAEFLKLIVGNQADFKKHF--NLEDK-T---PLQ--FAKDSYDEDLEN | 278 |
| WP_001040108 | 213 | LTDK-ISKSAKKDRILAQ-Y-PN QKSTGIFAEFLKLIVGNQADFKKHF--NLEDK-T---PLQ--FAKDSYDEDLEN | 278 |
| WP_001040109 | 213 | LTDK-ISKSAKKDRILAQ-Y-PN QKSTGIFAEFLKLIVGNQADFKKHF--NLEDK-T---PLQ--FAKDSYDEDLEN | 278 |
| WP_001040110 | 213 | LTDK-ISKSAKKDRILAQ-Y-PN QKSTGIFAEFLKLIVGNQADFKKHF--NLEDK-T---PLQ--FAKDSYDEDLEN | 278 |
| WP_015058523 | 213 | LTDK-ISKSAKKDRILAQ-Y-PN QKSTGIFAEFLKLIVGNQADFKKHF--NLEDK-T---PLQ--FAKDSYDEDLEN | 278 |
| WP_017643650 | 213 | LTDK-ISKSAKKDRILAR-Y-PN QKSTGIFAEFLKLIVGNQADFKKHF--NLEDK-T---PLQ--FAKDSYDEDLEN | 278 |
| WP_017647151 | 213 | LTDK-ISKSAKKDRILAQ-Y-PN QKSTGIFAEFLKLIVGNQADFKKHF--NLEDK-T---PLQ--FAKDSYDEDLEN | 278 |
| WP_017648376 | 213 | LTDK-ISKSAKKDRILAQ-Y-PN QKSTGIFAEFLKLIVGNQADFKKHF--NLEDK-T---PLQ--FAKDSYDEDLEN | 278 |
| WP_017649527 | 213 | LTDK-ISKSAKKDRILAQ-Y-PN QKSTGIFAEFLKLIVGNQADFKKYF--NLEDK-T---PLQ--FAKDSYDEDLEN | 278 |
| WP_017771611 | 213 | LTDK-ISKSAKKDRILAQ-Y-PN QKSTGIFAEFLKLIVGNQADFKKHF--NLEDK-T---PLQ--FAKDSYDEDLEN | 278 |
| WP_017771984 | 213 | LTDK-ISKSAKKDRILAQ-Y-PN QKSTGIFAEFLKLIVGNQADFKKYF--NLEDK-T---PLQ--FAKDSYDEDLEN | 278 |
| CFQ25032 | 213 | LTDK-ISKSAKKDRILAQ-Y-PN QKSTGIFAEFLKLIVGNQADFKKYF--NLEDK-T---PLQ--FAKDSYDEDLEN | 278 |
| CFV16040 | 213 | LTDK-ISKSAKKDRILAQ-Y-PN QKSTGIFAEFLKLIVGNQADFKKYF--NLEDK-T---PLQ--FAKDSYDEDLEN | 278 |
| KLJ37842 | 213 | LTDK-ISKSAKKDRILAQ-Y-PN QKSTGIFAEFLKLIVGNQADFKKYF--NLEDK-T---PLQ--FAKDSYDEDLEN | 278 |
| KLJ72361 | 213 | LTDK-ISKSAKKDRILAQ-Y-PN QKSTGIFAEFLKLIVGNQADFKKYF--NLEDK-T---PLQ--FAKDSYDEDLEN | 278 |
| KLL20707 | 213 | LTDK-ISKSAKKDRILAQ-Y-PN QKSTGIFAEFLKLIVGNQADFKKYF--NLEDK-T---PLQ--FAKDSYDEDLEN | 278 |
| KLL42645 | 213 | LTDK-ISKSAKKDRILAQ-Y-PN QKSTGIFAEFLKLIVGNQADFKKHF--NLEDK-T---PLQ--FAKDSYDEDLEN | 278 |
| WP_047207273 | 213 | LTDK-ISKSAKKDRILAQ-Y-PN QKSTGIFAEFLKLIVGNQADFKKYF--NLEDK-T---PLQ--FAKDSYDEDLEN | 278 |
| WP_047209694 | 213 | LTDK-ISKSAKKDRILAR-Y-PN QKSTGIFAEFLKLIVGNQADFKKHF--NLEDK-T---PLQ--FAKDSYDEDLEN | 278 |
| WP_050198062 | 213 | LTDK-ISKSAKKDRILAQ-Y-PN QKSTGIFAEFLKLIVGNQADFKKYF--NLEDK-T---PLQ--FAKDSYDEDLEN | 278 |
| WP_050201642 | 213 | LTDK-ISKSAKKDRILAQ-Y-PN QKSTGIFAEFLKLIVGNQADFKKYF--NLEDK-T---PLQ--FAKDSYDEDLEN | 278 |
| WP_050204027 | 213 | LTDK-ISKSAKKDRILAQ-Y-PN QKSTGIFAEFLKLIVGNQADFKKHF--NLEDK-T---PLQ--FAKDSYDEDLEN | 278 |
| WP_050881965 | 213 | LTDK-ISKSAKKDRILAQ-Y-PN QKSTGIFAEFLKLIVGNQADFKKYF--NLEDK-T---PLQ--FAKDSYDEDLEN | 278 |
| WP_050886065 | 213 | LTDK-ISKSAKKDRILAQ-Y-PN QKSTGIFAEFLKLIVGNQADFKKYF--NLEDK-T---PLQ--FAKDSYDEDLEN | 278 |
| AHN30376 | 213 | LTDK-ISKSAKKDRILAQ-Y-PN QKSTGIFAEFLKLIVGNQADFKKHF--NLEDK-T---PLQ--FAKDSYDEDLEN | 278 |
| EAO78426 | 213 | LTDK-ISKSAKKDRILAQ-Y-PN QKSTGIFAEFLKLIVGNQADFKKYF--NLEDK-T---PLQ--FAKDSYDEDLEN | 278 |
| CCW42055 | 213 | LTDK-ISKSAKKDRILAQ-Y-PD QKSTGIFAEFLKLIVGNQADFKKHF--NLEDK-T---PLQ--FAKDSYDEDLEN | 278 |
| WP_003041502 | 212 | LTEK-VSKSRRLENLIAH-Y-PA EKKNTLEGNLIALFLGLQPNEKTNE--QLSED-A---KLQ--FSKDTYEEDLEG | 277 |
| WP_037593752 | 213 | LTEK-VSKSSRLENLIAH-Y-PT EKKNTLEGNLIALSLGLQPNEKTNE--QLSED-A---KLQ--FSKDTYEEDLEE | 278 |
| WP_049516684 | 213 | LTEK-VSKSRRLENLVEC-Y-PT EKKNTLEGNLIALSLGLQPNEKTNE--QLSED-A---KLQ--FSKDTYEEDLEG | 278 |
| GAD46167 | 212 | LTEK-VSKSSRLENLIAH-Y-PT EKKNTLEGNLIALSLGLQPNEKTNE--QLSED-A---KLQ--FSKDTYEEDLEE | 277 |
| WP_018363470 | 213 | LTEK-ISKSRRLENLINN-Y-PK EKKNTLEGNLIALALGLQPNEKTNE--KLSED-A---KLQ--FSKDTYEEDLEE | 278 |
| WP_003043819 | 212 | LSAR-LSKSKRLEKLIAV-F-PN EKKNGLFGNIIALALGLTPNEKSNF--DLTED-A---KLQ--LSKDTYDDDLDE | 277 |
| WP_006269658 | 212 | LTEK-VSKSSRLENLIAH-Y-PT EKKNTLEGNLIALSLDLHPNEKTNE--QLSED-A---KLQ--FSKDTYEEDLEG | 277 |
| WP_048800889 | 212 | LTEK-VSKSRRLENLVKC-Y-PT EKKNTLEGNLIALSLGLQPNEKTNE--QLSED-A---KLQ--FSKDTYEEDLEE | 277 |
| WP_012767106 | 212 | LSAR-LSKSRRLENLIAQ-L-PG EKRNGLEGNLIALSLGLTPNEKSNF--DLAED-A---KLQ--LSKDTYDDDLDN | 277 |
| WP_014612333 | 212 | LSAR-LSKSKRLENLIAQ-L-PG EKKNGLEGNLIALSLGLTPNEKSNF--DLAED-A---KLQ--LSKDTYDDDLDN | 277 |
| WP_015017095 | 212 | LSAR-LSKSRRLENLIAQ-L-PG EKRNGLEGNLIALSLGLTPNEKSNF--DLAED-A---KLQ--LSKDTYDDDLDN | 277 |
| WP_015057649 | 212 | LSAR-LSKSRRLENLIAQ-L-PG EKRNGLEGNLIALSLGLTPNEKSNF--DLAED-A---KLQ--LSKDTYDDDLDN | 277 |
| WP_048327215 | 212 | LSAR-LSKSRRLENLIAQ-L-PG EKRNGLEGNLIALSLGLTPNEKSNF--DLAED-A---KLQ--LSKDTYDDDLDN | 277 |
| WP_049519324 | 212 | LSAR-LSKSRRLENLIAQ-L-PG EKRNGLEGNLIALSLGLTPNEKSNF--DLAED-A---KLQ--LSKDTYDDDLDN | 277 |
| WP_012515931 | 212 | LSAA-LSKSKRLENLISL-I-PG QKKTGIFGNIIALSLGLTPNEKANF--GLSKD-V---KLQ--LAKDTYADDLDS | 277 |
| WP_021320964 | 212 | LSAA-LSKSKRLENLISL-I-PG QKKTGIFGNIIALSLGLTPNEKANF--GLSKD-V---KLQ--LAKDTYADDLDS | 277 |
| WP_037581760 | 212 | LSAA-LSKSKRLENLISL-I-PG QKKTGIFGNIIALSLGLTPNEKANF--GLSKD-V---KLQ--LAKDTYADDLDS | 277 |
| WP_004232481 | 212 | LTEK-ISKSRRLENLIKQ-Y-PT EKKNTLFGNLVALALGLQPNFKTNF--KLSED-A---KLQ--FSKDTYDEDLEE | 277 |
| WP_009854540 | 213 | LTEK-ISKSRRLENLIKY-Y-PT EKKNTLEGNLIALALGLQPNEKMNF--KLSED-A---KLQ--FSKDTYEEDLEE | 278 |
| WP_012962174 | 213 | LTEK-FSKSRRLENLIKH-Y-PT EKKNTLFGNLVALALGLQPNFKTSF--KLSED-A---KLQ--FSKDTYEEDLEE | 278 |
| WP_039695303 | 213 | LTEK-ISKSRRLENLIKY-Y-PT EKKNTLEGNLIALALGLQPNEKTNE--KLSED-A---KLQ--FSKDTYEEDLEE | 278 |
| WP_014334983 | 212 | LTEK-VSKSRRLENLIKQ-Y-PT EKKNTLEGNLIALALGLQPNEKTNE--KLSED-A---KLQ--FSKDTYEEDLEE | 277 |
| WP_003099269 | 212 | LTSK-TSKSRRLENLIAE-I-PN QKRNMLFGNLVSLALGLTPNFKTNF--ELLED-A---KLQ--ISKDSYEEDLDN | 277 |
| AHY15608 | 212 | LTSK-TSKSRRLENLIAE-I-PN QKRNMLFGNLVSLALGLTPNFKTNF--ELLED-A---KLQ--ISKDSYEEDLDN | 277 |
| AHY17476 | 212 | LTSK-TSKSRRLENLIAE-I-PN QKRNMLFGNLVSLALGLTPNFKTNF--ELLED-A---KLQ--ISKDSYEEDLDN | 277 |
| ESR09100 | | ----------------------- ------------------------------------------------------ | |
| AGM98575 | 212 | LTSK-TSKSRRLENLIAE-I-PN QKRNMLFGNLVSLALGLTPNFKTNF--ELLED-A---KLQ--ISKDSYEEDLDN | 277 |
| ALF27331 | 212 | LTDK-ISKSAKKDRVLKL-F-PN EKSNGRFAEFLKLIVGNQADFKKHF--ELEEK-A---PLQ--FSKDTYEEELEV | 277 |
| WP_018372492 | 210 | FTEN-SSKAKRVETILGL-F-PD ETAAGNLDKFLKLMLGNQADFKKVF--DLEEK----iTLQ--FSKDSYEEDLEL | 275 |
| WP_045618028 | 213 | FTDK-ISKSAKRERVLKL-F-PD EKSTGLFSEFLKLIVGNQADFKKHF--DLEEK-A---PLQ--FSKDTYDEDLEN | 278 |
| WP_045635197 | 212 | FTDK-ISKSAKRERVLKL-F-PD EKSTGLFSEFLKLIVGNQADFKKHF--DLEDK-A---PLQ--FSKDTYDEDLEN | 277 |
| WP_002263549 | 212 | LTDK-ISKSAKKDRVLKL-F-PN EKSNGRFAEFLKLIVGNQADFKKHF--ELEEK-A---PLQ--FSKDTYEEELEV | 277 |
| WP_002263887 | 212 | LTDK-ISKSAKKDRVLKL-F-PN EKSNGRFAEFLKLIVGNQADFKKHF--ELEEK-A---PLQ--FSKDTYEEELEV | 277 |
| WP_002264920 | 212 | LTEK-ISKSRRLEKLINN-Y-PK EKKNTLFRNLVALSLGLQPNFKTNF--KLSED-A---KLQ--FSKDTYEEDLEE | 277 |
| WP_002269043 | 212 | LTDK-ISKSAKKDRVLKL-F-PN EKSNGRFAEFLKLIVGNQADFKKHF--ELEEK-A---PLQ--FSKDIYEEELEV | 277 |
| WP_002269448 | 212 | LTDK-ISKSAKKDRVLKL-F-PN EKSNGRFAEFLKLIVGNQADFKKHF--ELEEK-A---PLQ--FSKDTYEEELEV | 277 |
| WP_002271977 | 212 | LTDK-ISKSAKKDRVLKL-F-PN EKSNGRFAEFLKLIVGNQADFKKHF--ELEEK-A---PLQ--FSKDTYEEDLEE | 277 |
| WP_002272766 | 212 | LTDK-ISKSAKKDRVLKL-F-PN EKSNGRFAEFLKLIVGNQADFKKHF--ELEEK-A---PLQ--FSKDTYEEDLEE | 277 |
| WP_002273241 | 212 | LTDK-ISKSAKKDRVLKL-F-PN EKSNGRFAEFLKLIVGNQADFKKHF--ELEEK-A---PLQ--FSKDTYEEELEV | 277 |
| WP_002275430 | 212 | LTDK-ISKSAKKDRVLKL-F-PN EKSNGRFAEFLKLIVGNQADFKKHF--ELEEK-A---PLQ--FSKDTYEEELEV | 277 |
| WP_002276448 | 212 | LTDK-ISKSAKKDRVLKL-F-PN EKSNGRFAEFLKLIVGNQADFKKHF--ELEEK-A---PLQ--FSKDTYEEELEV | 277 |
| WP_002277050 | 212 | LTEK-ISKSRRLEKLINN-Y-PK EKKNTLEGNLIALSLGLQPNEKTNE--KLSED-A---KLQ--FSKDTYEEDLEE | 277 |
| WP_002277364 | 212 | LTDK-ISKSAKKDRVLKL-F-PN EKSNGRFAEFLKLIVGNQADFKKHF--ELEEK-A---PLQ--FSKDTYEEELEV | 277 |
| WP_002279025 | 212 | LTDK-ISKSAKKDRVLKL-F-PN EKSNGRFAEFLKLIVGNQADFKKHF--ELEEK-A---PLQ--FSKDTYEEELEV | 277 |
| WP_002279859 | 212 | LTEK-ISKSRRLEKLINN-Y-PK EKKNTLEGNLIALSLGLQPNEKTNE--KLSED-A---KLQ--FSKDTYEEELEV | 277 |
| WP_002280230 | 212 | LTDK-ISKSAKKDRVLKL-F-PN EKSNGRFAEFLKLIVGNQADFKKHF--ELEEK-A---PLQ--FSKDTYEEELEV | 277 |
| WP_002281696 | 212 | LTDK-ISKSAKKDRVLKL-F-PN EKSNGRFAEFLKLIVGNQADFKKHF--ELEEK-A---PLQ--FSKDTYEEELEV | 277 |
| WP_002282247 | 212 | LTEK-ISKSRRLEKLINN-Y-PK EKKNTLEGNLIALSLGLQPNEKTNE--KLSED-A---KLQ--FSKDTYEEDLEE | 277 |
| WP_002282906 | 212 | LTDK-ISKSAKKDRVLKL-F-PN EKSNGRFAEFLKLIVGNQADFKKHF--ELEEK-A---PLQ--FSKDTYEEELEV | 277 |
| WP_002283846 | 212 | LTDK-ISKSAKKDRVLKL-F-PN EKSNGRFAEFLKLIVGNQADFKKHF--ELEEK-A---PLQ--FSKDIYEEELEV | 277 |
| WP_002287255 | 212 | LTDK-ISKSAKKDRVLKL-F-PN EKSNGRFAEFLKLIVGNQADFKKHF--ELEEK-A---PLQ--FSKDTYEEELEV | 277 |
| WP_002288990 | 212 | LTDK-ISKSAKKDRVLKL-F-PN EKSNGRFAEFLKLIVGNQADFKKHF--ELEEK-A---PLQ--FSKDIYEEELEV | 277 |
| WP_002289641 | 212 | LTDK-ISKSAKKDRVLKL-F-PN EKSNGCFAEFLKLIVGNQADFKKHF--ELEEK-A---PLQ--FSKDTYEEELEV | 277 |
| WP_002290427 | 212 | LTDK-ISKSAKKDRVLKL-F-PN EKSNGRFAEFLKLIVGNQADFKKHF--ELEEK-A---PLQ--FSKDIYEEELEV | 277 |
| WP_002295753 | 212 | LTDK-ISKSAKKDRVLKL-F-PN EKSNGRFAEFLKLIVGNQADFKKHF--ELEEK-A---PLQ--FSKDTYEEELEV | 277 |
| WP_002296423 | 212 | LTDK-ISKSAKKDRVLKL-F-PN EKSNGRFAEFLKLIVGNQADFKKHF--ELEEK-A---PLQ--FSKDIYEEELEV | 277 |
| WP_002304487 | 212 | LTEK-VSKSRRLENLVEC-Y-PT EKKNTLEGNLIALSLGLQPNEKTNE--QLSED-A---KLQ--FSKDTYEEDLEG | 277 |
| WP_002305844 | 212 | LTDK-ISKSAKKDRVLKL-F-PN EKSNGRFAEFLKLIVGNQADFKKHF--ELEEK-A---PLQ--FSKDTYEEELEV | 277 |
| WP_002307203 | 212 | LTDK-ISKSAKKDRVLKL-F-PN EKSNGRFAEFLKLIVGNQADFKKHF--ELEEK-A---PLQ--LSKDTYEEELEV | 277 |
| WP_002310390 | 212 | LTDK-ISKSAKKDRVLKL-F-PN EKSNGRFAEFLKLIVGNQADFKKHF--ELEEK-A---PLQ--FSKDIYEEELEV | 277 |
| WP_002352408 | 212 | LTDK-ISKSAKKDRVLKL-F-PN EKSNGRFAEFLKLIVGNQADFKKHF--ELEEK-A---PLQ--FSKDIYEEELEV | 277 |
| WP_012997688 | 212 | LTDK-ISKSAKKDRVLKL-F-PN EKSNGRFAEFLKLIVGNQADFKKHF--ELEEK-A---PLQ--FSKDTYEEELEV | 277 |
| WP_014677909 | 212 | LTDK-ISKSAKKDRVLKL-F-PN EKSNGRFAEFLKLIVGNQADFKKHF--ELEEK-A---PLQ--FSKDIYEEELEV | 277 |
| WP_019312892 | 212 | LTDK-ISKSAKKDRVLKL-F-PN EKSNGRFAEFLKLIVGNQADFKKHF--ELEEK-A---PLQ--FSKDTYEEELEV | 277 |
| WP_019313659 | 212 | LTDK-ISKSAKKDRVLKL-F-PN EKSNGRFAEFLKLIIGNQADFKKHF--ELEEK-A---PLQ--FSKDTYEEELEV | 277 |
| WP_019314093 | 212 | LTDK-ISKSAKKDRVLKL-F-PN EKSNGRFAEFLKLIVGNQADFKKHF--ELEEK-A---PLQ--LSKDTYEEELEV | 277 |
| WP_019315370 | 212 | LTDK-ISKSAKKDRVLKL-F-PN EKSNGRFAEFLKLIVGNQADFKKHF--ELEEK-A---PLQ--FSKDTYEEELEV | 277 |
| WP_019803776 | 212 | LTDK-ISKSAKKDRVLKL-F-PN EKSNGRFAEFLKLIVGNQADFKKHF--ELEEK-V---PLQ--FSKDTYEEELEV | 277 |
| WP_019805234 | 212 | LTDK-ISKSAKKDRVLKL-F-PN EKSNGRFAEFLKLIVGNQADFKKHF--ELEEK-A---PLQ--FSKDIYEEELEV | 277 |
| WP_024783594 | 212 | LTDK-ISKSAKKDRVLKL-F-PN EKSNGRFAEFLKLIVGNQADFKKHF--ELEEK-A---PLQ--FSKDTYEEELEV | 277 |
| WP_024784288 | 212 | LTEK-ISKSRRLEKLINN-Y-PK EKKNTLEGNLIALSLGLQPNEKTNE--KLSED-A---KLQ--FSKDTYEEDLEE | 277 |
| WP_024784666 | 212 | LTDK-ISKSAKKDRVLKL-F-PN EKSNGRFAEFLKLIVGNQADFKKHF--ELEEK-A---PLQ--FSKDTYEEELEV | 277 |
| WP_024784894 | 212 | LTDK-ISKSAKKDRVLKL-F-PN EKSNGRFAEFLKLIVGNQADFKKHF--ELEEK-A---PLQ--FSKDTYEEELEV | 277 |
| WP_024786433 | 212 | LTEK-ISKSRRLEKLINN-Y-PK EKKNTLEGNLIALSLGLQPNEKTNE--KLSED-A---KLQ--FSKDTYEEDLEE | 277 |
| WP_049473442 | 212 | LTDK-ISKSAKKDRVLKL-F-PN EKSNGRFAEFLKLIVGNQADFKKHF--ELEEK-A---PLQ--FSKDTYEEDLEE | 277 |
| WP_049474547 | 212 | LTDK-ISKSAKKDRVLKL-F-PN EKSNGRFAEFLKLIVGNQADFKKHF--ELEEK-A---PLQ--FSKDTYEEELEV | 277 |
| EMC03581 | 205 | LTDK-ISKSAKKDRVLKL-F-PN EKSNGRFAEFLKLIVGNQADFKKHF--ELEEK-A---PLQ--FSKDTYEEELEV | 270 |
| WP_000428612 | 213 | FTDK-ISKSAKRERVLKL-F-PD EKSTGLFSEFLKLIVGNQADFKKHF--DLEEK-A---PLQ--FSRDTYDEDLEN | 278 |
| WP_000428613 | 213 | FTDK-ISKSAKRERVLKL-F-PD EKSTGLFSEFLKLIVGNQADFKKHF--DLGEK-A---PLQ--FSKDTYDEDLEN | 278 |
| WP_049523028 | 212 | FTDK-ISKSAKRDRVLKL-F-PD EKSTGLFSEFLKLIVGNQADFKKHF--DLEEK-A---PLQ--FSKDTYEEDLES | 277 |
| WP_003107102 | 181 | LTEK-MSKSRRLENLIAK-I-PN QKKNTLEGNLISLSLGLTPNFKANF--ELSED-A---KLQ--ISKESFEEDLDN | 246 |
| WP_054279288 | 214 | LTEK-ISKTRRLENLISN-I-PG QKKNGLFGNLIALSLGLTPNEKSHF--NLPED-A---KLQ--LAKDTYDEELNN | 279 |
| WP_049531101 | 213 | FTDK-ISKSTKRERVLKL-F-PD QKSTGLFSEFLKLIVGNQADFKKHF--DLEEK-A---PLQ--FSKDTYDEDLEN | 278 |
| WP_049538452 | 213 | FSDK-ISKSAKRERVLKL-F-PD EKSTGLFSEFLKLIVGNQADFKKHF--DLEEK-A---PLQ--FSKDTYDEDLEN | 278 |
| WP_049549711 | 213 | FTDK-ISKSAKRERVLKL-F-PD EKSTGLFSEFLKLIVGNQADFKKHF--DLGEK-A---PLQ--FSKDTYDEDLEN | 278 |
| WP_007896501 | 214 | LTAK-TSKSKRLESLISE-F-PG QKKNGLFGNLLALALGLRPNFKSNF--GLSED-A---KLQ--ITKDTYEEELDN | 279 |
| EFR44625 | 166 | LTAK-TSKSKRLESLISE-F-PG QKKNGLFGNLLALALGLRPNFKSNF--GLSED-A---KLQ--ITKDTYEEELDN | 231 |
| WP_002897477 | 212 | FTDK-ISKSAKRERVLKL-F-PD EKSTGLFSEFLKLIVGNQADFKKHF--DLEEK-A---PLQ--FSKDTYDEELEN | 277 |
| WP_002906454 | 212 | FTDK-ISKSTKRERVLKL-F-SD EKSTGLFSEFLKLIVGNQADFKKHF--DLEEK-A---PLQ--FSKDTYDEDLEN | 277 |
| WP_009729476 | 213 | FTDK-ISKSAKRERVLKL-F-PD EKSTGLFSEFLKLIVGNQADFKKHF--DLEEK-A---PLQ--FSRDTYDEDLEN | 278 |
| CQR24647 | 212 | ITAK-ISKSRKVEAVLEQ-F-PD QKKNSFEGNMVSLVEGLMPNEKSNF--ELDED-A---KLQ--FSRDSYDEDLEN | 277 |
| WP_000066813 | 213 | FTDK-ISKSTKRERVLKL-F-PD EKSTGLFSEFLKLIVGNQADFKKHF--DLEEK-A---PLQ--FSKDTYDEDLEN | 278 |
| WP_009754323 | 213 | FTGK-ISKSVKREHVLKL-F-PD EKSTGLFSEFLKLIVGNQADFKKHF--DLEEK-A---SLQ--FSKDTYDEDLEN | 278 |
| WP_044674937 | 212 | LVEK-VSKSRRLENILHY-F-PN EKKNGLFGNFLALALGLQPNFKTNF--ELAED-A---KIQ--FSKETYEEDLEE | 277 |
| WP_044676715 | 212 | LVEK-VSKSRRLENILHY-F-PN EKKNGLFGNFLTLALGLQPNFKTNF--ELAED-A---KIQ--FSKETYEEDLEE | 277 |
| WP_044680361 | 212 | LVEK-VSKSRRLENILHY-F-PN EKKNGLFGNFLALALGLQPNFKTNF--ELAED-A---KIQ--FSKETYEEDLEE | 277 |
| WP_044681799 | 212 | LVEK-VSKSRRLENILHY-F-PN EKKNGLFGNFLALALGLQPNFKTNF--ELAED-A---KIQ--FSKETYEEDLEE | 277 |
| WP_049533112 | 212 | LTEK-VSKSRRLENLIAH-Y-PA EKKNTLFGNLIALSLGLQPNEKTNF--QLSED-A---KLQ--FSKDTYEEDLEG | 277 |
| WP_029090905 | 172 | LLDRmMNRSSKVKFLIEL---TG KQDKPLLKELFNLIVGLKAKPASIFe---QENlAtivETM-nMSTEQVQLDLLT | 243 |
| WP_006506696 | 211 | LKKP-LSKKAKVDEVMTL-IaPE KDYKSAFKELVTGIAGNKMNVTKMI1cEPIKQ-Gds-EIK1kFSDSNYDDQFSE | 283 |
| AIT42264 | 212 | LSAR-LSKSRRLENLIAQ-L-PG EKKNGLFGNLIALSLGLTPNEKSNF--DLAED-A---KLQ--LSKDTYDDDLDN | 277 |
| WP_034440723 | 218 | FKQD-ISRSKKLDQAIAL-F-QG -KRQSLFGIFLTLIVGNKANFQKIF--NLEDD----iKLD--LKEEDYDENLEE | 283 |
| AKQ21048 | 212 | LSAR-LSKSRRLENLIAQ-L-PG EKKNGLFGNLIALSLGLTPNEKSNF--DLAED-A---KLQ--LSKDTYDDDLDN | 277 |
| WP_004636532 | 211 | LSSK-QSRSRKHEQIMAL-F-PN ENKLGNFGRFMMLIVGNTSNFKPVF--DLDDE-Y---KLK--LSDETYEEDLDT | 276 |
| WP_002364836 | 218 | LTEK-ASRTKKSEKVLQQ-F-PQ EKANGLFGQFLKLMVGNKADFKKVF--GLEEE-A---KI--tYASESYEEDLEG | 283 |
| WP_016631044 | 169 | LTEK-ASRTKKSEKVLQQ-F-PQ EKANGLFGQFLKLMVGNKADFKKVF--GLEEE-A---KI--tYASESYEEDLEG | 234 |
| EMS75795 | 1 | ----------------------- ----------------------------MDEE-A---KIQ--LSKESYEEELES | 20 |
| WP_002373311 | 218 | LTEK-ASRTKKSEKVLQQ-F-PQ EKANGLFGQFLKLMVGNKADFKKVF--GLEEE-A---KI--tYASESYEEDLEG | 283 |
| WP_002378009 | 218 | LTEK-ASRTKKSEKVLQQ-F-PQ EKANGLFGQFLKLMVGNKADFKKVF--GLEEE-A---KI--tYASESYEEDLEG | 283 |
| WP_002407324 | 218 | LTEK-ASRTKKSEKVLQQ-F-PQ EKANGLFGQFLKLMVGNKADFKKVF--GLEEE-A---KI--tYASESYEEDLEG | 283 |
| WP_002413717 | 218 | LTEK-ASRTKKSEKVLQQ-F-PQ EKANGLFGQFLKLMVGNKADFKKVF--GLEEE-A---KI--tYASESYEEDLEG | 283 |
| WP_010775580 | 218 | LTEK-ASRTKKSEKVLQQ-F-PQ EKANGLFGQFLKLMVGNKADFKKVF--GLEEE-A---KIKitYASESYEEDLEG | 285 |
| WP_010818269 | 218 | LTEK-ASRTKKSEKVLQQ-F-PQ EKANGLFGQFLKLMVGNKADFKKVF--GLEEE-A---KI--tYASESYEEDLEG | 283 |
| WP_010824395 | 218 | LTEK-ASRTKKSEKVLQQ-F-PQ EKANGLFGQFLKLMVGNKADFKKVF--GLEEE-A---KI--tYASESYEEDLEG | 283 |
| WP_016622645 | 218 | LTEK-ASRTKKSEKVLQQ-F-PQ EKANGLFGQFLKLMVGNKADFKKVF--GLEEE-A---KI--tYASESYEEDLEG | 283 |
| WP_033624816 | 218 | LTEK-ASRTKKSEKVLQQ-F-PQ EKANGLFGQFLKLMVGNKADFKKVF--GLEEE-A---KI--tYASESYEEDLEG | 283 |
| WP_033625576 | 218 | LTEK-ASRTKKSEKVLQQ-F-PQ EKANGLFGQFLKLMVGNKADFKKVF--GLEEE-A---KI--tYASESYEEDLEG | 283 |
| WP_033789179 | 218 | LTEK-ASRTKKSEKVLQQ-F-PQ EKANGLFGQFLKLMVGNKADFKKVF--GLEEE-A---KI--tYASESYEEDLEG | 283 |
| WP_002310644 | 217 | FTEK-MSKIKKAEILLKY-F-PH EKSNGYLSQFIKLMVGNQGNFKNVF--GL-EE-A---KLQ--FSKETYEEDLEE | 281 |
| WP_002312694 | 217 | FTEK-MSKIKKAEILLKY-F-PH EKSNGYLSQFIKLMVGNQGNFKNVF--GL-EEeA---KLQ--FSKETYEEDLEE | 282 |
| WP_002314015 | 217 | FTEK-MSKIKKAEILLKY-F-PH EKSNGYLSQFIKLMVGNQGNFKNVF--GL-EEeA---KLQ--FSKETYEEDLEE | 282 |
| WP_002320716 | 217 | FTEK-MSKIKKAEILLKY-F-PH EKSNGYLSQFIKLMVGNQGNFKNVF--GL-EEeA---KLQ--FSKETYEEDLEE | 282 |
| WP_002330729 | 217 | FTEK-MSKIKKAEILLKY-F-PH EKSNGYLSQFIKLMVGNQGNFKNVF--GL-EE-A---KLQ--FSKETYEEDLEE | 281 |
| WP_002335161 | 217 | FTEK-MSKIKKAEILLKY-F-PH EKSNGYLSQFIKLMVGNQGNFKNVF--GL-EEeA---KLQ--FSKETYEEDLEE | 282 |
| WP_002345439 | 217 | FTEK-MSKIKKAEILLKY-F-PH EKSNGYLSQFIKLMVGNQGNFKNVF--GL-EEeA---KLQ--FSKETYEEDLEE | 282 |
| WP_034867970 | 210 | LTDK-LSKIKKVEEILKY-Y-PT EKINSFFAQCLKLIVGNQANFKRIF--DLEAE-V---KLQ--FSKETYEEDLES | 275 |
| WP_047937432 | 217 | FTEK-MSKIKKAEILLKY-F-PH EKSNGYLSQFIKLMVGNQGNFKNVF--GL-EEeA---KLQ--FSKETYEEDLEE | 282 |
| WP_010720994 | 210 | LTDK-LSKIKKVEEILKY-Y-PT EKINSFFAQCLKLIVGNQANFKRIF--DLEAE-V---KLQ--FSKETYEEDLES | 275 |
| WP_010737004 | 210 | LTDK-LSKIKKVEEILKY-Y-PT EKINSFFAQCLKLIVGNQANFKRIF--DLEAE-V---KLQ--FSKETYEEDLES | 275 |
| WP_034700478 | 210 | LTDK-LSKIKKVEEILKY-Y-PT EKINSFFAQCLKLIVGNQANFKRIF--DLEAE-V---KLQ--FSKETYEEDLES | 275 |
| WP_007209003 | 215 | LTQQ-LSKSERADNVLKL-F-PD EKGIGIFAQFIKLIVGNQGNFKKVF--QLEED----qKLQ--LSTDDYEENIEN | 280 |
| WP_023519017 | 210 | LTER-LSKAKRVEKVLAY-Y-PS EKSTGNFAQFLKLMVGNQANFKKTF--DLEEE-M---KLN--FTRDCYEEDLNE | 275 |
| WP_010770040 | 213 | FSEK-VSRARKVEAILSV-Y-SE EKSTGTLAQFLKLMVGNQGRFKKTF--DLEED-G---IIQ--IPKEEYEEELET | 278 |
| WP_048604708 | 209 | FADK-VSRAKKAEGVLAL-F-PD EKRNGTFDQFLKMIVGNQGNFKKTF--ELEED-A---KLQ--FSKEEYDESLEA | 274 |
| WP_010750235 | 210 | LTDK-LSKSKKVEKILQY-Y-PK EKTIGCLAQFLKLIVGNQGNFKQAF--HLDEE-V---KIQ--ISKETYEEDLEK | 275 |
| AII16583 | 251 | LSAR-LSKSRRLENLIAQ-L-PG EKKNGLFGNLIALSLGLIPNEKSNF--DLAED-A---KLQ--LSKDTYDDDLDN | 316 |
| WP_029073316 | 216 | LKEP-LSKKHKADKAFAL-FdTT KDNKAAYKELCAALAGNKENVIKMLkeAELHD-EdekDISfkFSDATFDDAFVE | 289 |
| WP_031589969 | 216 | LKEP-LSKKHKAEKAFAL-FdTT KDNKAAYKELCAALAGNKENVIKMLkeAELHD-EdekDISfkFSDATFDDAFVE | 289 |
| KDA45870 | 210 | FKDNtFSKTKKSEELLKL---SG -KKNQLAHQLFKMMVGNMGSFKKVL--GTDEE----hKLS--FGKDTYEDDLND | 275 |
| WP_039099354 | 207 | LLDNhQSASNRQRQALLLiYtPS KQNKAIATELLKAILGLKAKFNVLT--GIEAEdVktwTLT--FNAENFDEEMVK | 285 |
| AKP02966 | 209 | LIGR-GNATQKSSNILNN-F--T KETKKLLKEVINLILGNVAHLNTIFktSLIKDeE---KLS--FSGKDIESKLDD | 278 |
| WP_010991369 | 218 | LVEK-VTRKEKLERILKL-Y-PG EKSAGMFAQFISLIVGSKGNFQKPF--DLIEK-S---DIE--CAKDSYEEDLES | 283 |
| WP_033838504 | 218 | LVEK-VTRKEKLERILKL-Y-PG EKSAGMFAQFISLIVGSKGNFQKPF--DLIEK-S---DIE--CAKDSYEEDLES | 283 |
| EHN60060 | 221 | LVEK-VTRKEKLERILKL-Y-PG EKSAGMFAQFISLIVGSKGNFQKPF--DLIEK-S---DIE--CAKDSYEEDLES | 286 |
| EFR89594 | 1 | ---------------LKL-Y-PG EKSTGMFAQFISLIVGSKGNFQKPF--DLIEK-S---DIE--CAKDSYEEDLES | 52 |
| WP_038409211 | 218 | LSEK-LTRREKLDKILKL-Y-TG EKSIGMFARFINLIIGSKGDFKKVF--DLDEK-A---EIE--CAKDIYEEDLEA | 283 |
| EFR95520 | | ----------------------- ------------------------------------------------------ | |
| WP_003723650 | 218 | LAGK-FTRREKFERILQL-Y-PG EKSIGMFAQFISLIVGSKGNFQKVF--DLIEK-T---DIE--CAKDSYEEDLET | 283 |
| WP_003727705 | 218 | LAGK-FTRREKFERILRL-Y-PG EKSIGMFAQFISLIVGNKGNFQKVF--NLVEK-T---DIE--CAKDSYEEDLEA | 283 |
| WP_003730785 | 218 | LAGK-FTRREKFERILRL-Y-PG EKSIGMFAQFISLIVGNKGNFQKVF--NLVEK-T---DIE--CAKDSYEEDLEA | 283 |
| WP_003733029 | 218 | LAEK-FTRKDKLDKILSL-Y-PG EKTIGVFAQFVNIIVGSTGKEKKHF--NLHEK-K---DIN--CAEDTYDIDLES | 283 |
| WP_003739838 | 218 | LAGK-FTRKEKLERILQL-Y-PG EKSIGMFAQFISLIVGSKGNFQKVF--DLVEK-T---DIE--CAKDSYEEDLEA | 283 |
| WP_014601172 | 218 | LAGK-FTRREKFERILQL-Y-PG EKSTGMFAQFISLIVGSKGNFQKVF--DLIEK-T---DIE--CAKDSYEEDLEA | 283 |
| WP_023548323 | 218 | LAGK-FTRREKFERILQL-Y-PG EKSTGMFAQFISLIVGSKGNFQKVF--DLIEK-T---DIE--CAKDSYEEDLET | 283 |
| WP_031665337 | 218 | LAGK-FTRREKFERILQL-Y-PG EKSTGMFAQFISLIVGSKGNFQKVF--DLIEK-T---DIE--CAKDSYEEDLET | 283 |
| WP_031669209 | 218 | LAEK-FTRKDKLDKILSL-Y-PG EKTTGVFAQFVNIIVGSTGKEKKHF--NLHEK-K---DIN--CAEDTYDIDLES | 283 |
| WP_033920898 | 218 | LARK-FTRREKFERILQL-Y-PG EKSTGMFAQFISLIVGSKGNFQKVF--DLIEK-T---DIE--CAKDSYEEDLET | 283 |
| AKI42028 | 221 | LAGK-FTRREKFERILQL-Y-PG EKSTGMFAQFISLIVGSKGNFQKVF--DLIEK-T---DIE--CAKDSYEEDLEA | 286 |
| AKI50529 | 221 | LARK-FTRREKFERILQL-Y-PG EKSTGMFAQFISLIVGSKGNFQKVF--DLIEK-T---DIE--CAKDSYEEDLET | 286 |
| EFR83390 | | ----------------------- ------------------------------------------------------ | |
| WP_046323366 | 218 | FSEK-LTKREKLDKILNL-Y-PN EKSTDLFAQFISLIIGSKGNEKKFF--NLTEK-T---DIE--CAKDSYEEDLEV | 283 |
| AKE81011 | 228 | LSAR-LSKSRRLENLIAQ-L-PG EKKNGLEGNLIALSLGLIPNEKSNF--DLAED-A---KLQ--LSKDTYDDDLDN | 293 |
| CUO82355 | 215 | LKKP-LSKKAKVDEVMAL-IsPE KEEKSAYKELVTGIAGNKMNVTKMIlcESIKQ-Gds-EIKlkFSDSNYDDQFSE | 287 |
| WP_033162887 | 216 | LSKI-YQRSKKADDLLKI-MnPT KEEKAAYKEFTKALVGLKENISKMIlaQEVKK-Gdt-DIVleFSNANYDSTIDE | 288 |
| AGZ01981 | 245 | LSAR-LSKSRRLENLIAQ-L-PG EKKNGLEGNLIALSLGLIPNEKSNF--DLAED-A---KLQ--LSKDTYDDDLDN | 310 |
| AKA60242 | 212 | LSAR-LSKSRRLENLIAQ-L-PG EKKNGLEGNLIALSLGLIPNEKSNF--DLAED-A---KLQ--LSKDTYDDDLDN | 277 |
| AKS40380 | 212 | LSAR-LSKSRRLENLIAQ-L-PG EKKNGLEGNLIALSLGLIPNEKSNF--DLAED-A---KLQ--LSKDTYDDDLDN | 277 |
| 4UN5_B | 216 | LSAR-LSKSRRLENLIAQ-L-PG EKKNGLEGNLIALSLGLIPNEKSNF--DLAED-A---KLQ--LSKDTYDDDLDN | 281 |
| WP_010922251 | 278 | [chemical structure] | 356 |
| WP_039695303 | 279 | LLGKIGDDYADLFTSAKNLYDAILLSGILTVDDNSTKAPLSASMIKRYVEHHEDLEKLKEFIKAN-KSELYHDIFKDKNK | 357 |
| WP_045635197 | 278 | LLGQIGDDFIDLFVSAKKLYDAILLSGILTVIDPSTKAPLSASMIERYENHQNDLAALKQFIKNN-LPEKYDEVFSDQSK | 356 |
| 5AXW_A | 158 | ---------------------------------------------------------LERLKKDG-------EVR----- | 168 |
| WP_009880683 | 1 | ---------------------------------------LSASMIKRYDEHHQDLTLLKALVRQQ-LPEKYKEIFFDQSK | 40 |
| WP_010922251 | 278 | LLAQIGDQYADLFLAAKNLSDAILLSDILRVNTEITKAPLSASMIKRYDEHHQDLILLKALVRQQ-LPEKYKEIFFDQSK | 356 |
| WP_011054416 | 278 | LLAQIGDQYADLFLAAKNLSDAILLSDILRVNSEITKAPLSASMIKRYDEHHQDLILLKALVRQQ-LPEKYKEIFFDQSK | 356 |
| WP_011284745 | 278 | LLAQIGDQYADLFLAAKNLSDAILLSDILRLNSEITKAPLSASMIKRYDEHHQDLILLKALVRQQ-LPEKYKEIFFDQSK | 356 |
| WP_011285506 | 278 | LLAQIGDQYADLFLAAKNLSDAILLSDILRVNTEITKAPLSASMIKRYDEHHQDLILLKALVRQQ-LPEKYKEIFFDQSK | 356 |
| WP_011527619 | 278 | LLAQIGDQYADLFLAAKNLSDAILLSDILRLNSEITKAPLSASMIKRYDEHHQDLILLKALVRQQ-LPEKYKEIFFDQSK | 356 |
| WP_012560673 | 278 | LLAQIGDQYADLFLAAKNLSDAILLSDILRVNTEITKAPLSASMIKRYDEHHQDLILLKALVRQQ-LPEKYKEIFFDQSK | 356 |
| WP_014407541 | 278 | LLAQIGDQYADLFLAAKNLSDAILLSDILRVNSEITKAPLSASMIKRYDEHHQDLILLKALVRQQ-LPEKYKEIFFDQSK | 356 |
| WP_020905136 | 278 | LLAQIGDQYADLFLAAKNLSDAILLSDILRLNSEITKAPLSASMIKRYDEHHQDLILLKALVRQQ-LPEKYKEIFFDQSK | 356 |
| WP_023080005 | 278 | LLAQIGDQYADLFLAAKNLSDAILLSDILRVNSEITKAPLSASMIKRYDEHHQDLILLKALVRQQ-LPEKYKEIFFDQSK | 356 |
| WP_023610282 | 278 | LLAQIGDQYADLFLAAKNLSDAILLSDILRVNSEITKAPLSASMIKRYDEHHQDLILLKALVRQQ-LPEKYKEIFFDQSK | 356 |
| WP_030125963 | 278 | LLAQIGDQYADLFLAAKNLSDAILLSDILRVNTEITKASLSASMIKRYDEHHQDLILLKALVRQQ-LPEKYKEIFFDQSK | 356 |
| WP_030126706 | 278 | LLAQIGDQYADLFLAAKNLSDAILLSDILRVNSEITKAPLSASMIKRYDEHHQDLILLKALVRQQ-LPEKYKEIFFDQSK | 356 |
| WP_031488318 | 278 | LLAQIGDQYADLFLAAKNLSDAILLSDILRVNSEITKAPLSASMIKRYDEHHQDLILLKALVRQQ-LPEKYKEIFFDQSK | 356 |
| WP_032460140 | 278 | LLAQIGDQYADLFLAAKNLSDAILLSDILRVNTEITKAPLSASMIKRYDEHHQDLILLKALVRQQ-LPEKYKEIFFDQSK | 356 |
| WP_032461047 | 278 | LLAQIGDQYADLFLAAKNLSDAILLSDILRVNTEITKAPLSASMIKRYDEHHQDLILLKALVRQQ-LPEKYKEIFFDQSK | 356 |
| WP_032462016 | 278 | LLAQIGDQYADLFLAAKNLSDAILLSDILRVNTEITKAPLSASMIKRYDEHHQDLILLKALVRQQ-LPEKYKEIFFDQSK | 356 |
| WP_032462936 | 278 | LLAQIGDQYADLFLAAKNLSDAILLSDILRVNSEITKAPLSASMIKRYDEHHQDLILLKALVRQQ-LPEKYKEIFFDQSK | 356 |
| WP_032464890 | 278 | LLAQIGDQYADLFLAAKNLSDAILLSDILRLNSEITKAPLSASMIKRYDEHHQDLILLKALVRQQ-LPEKYKEIFFDQSK | 356 |
| WP_033888930 | 103 | LLAQIGDQYADLFLAAKNLSDAILLSDILRVNTEITKAPLSASMIKRYDEHHQDLILLKALVRQQ-LPEKYKEIFFDQSK | 181 |
| WP_038431314 | 278 | LLAQIGDQYADLFLAAKNLSDAILLSDILRVNSEITKAPLSASMIKRYDEHHQDLILLKALVRQQ-LPEKYKEIFFDQSK | 356 |
| WP_038432938 | 278 | LLAQIGDQYADLFLAAKNLSDAILLSDILRVNSEITKAPLSASMIKRYDEHHQDLILLKALVRQQ-LPEKYKEIFFDQSK | 356 |
| WP_038434062 | 278 | LLAQIGDQYADLFLAAKNLSDAILLSDILRVNSEITKAPLSASMIKRYDEHHQDLILLKALVRQQ-LPEKYKEIFFDQSK | 356 |
| BAQ51233 | 189 | LLAQIGDQYADLFLAAKNLSDAILLSDILRVNTEITKAPLSASMIKRYDEHHQDLILLKALVRQQ-LPEKYKEIFFDQSK | 267 |
| KGE60162 | | -------------------------------------------------------------------------------- | |
| KGE60856 | | -------------------------------------------------------------------------------- | |
| WP_002989955 | 278 | LLAQIGDQYADLFLAAKNLSDAILLSDILRLNSEITKAPLSASMIKRYDEHHQDLILLKALVRQQ-LPEKYKEIFFDQSK | 356 |
| WP_003030002 | 278 | LLGEIGDEYADLFASAKNLYDAILLSGILTVDDNSTKAPLSASMVKRYEEHQKDLKKLKDFIKVN-APDQYNAIFKDKNK | 356 |
| WP_003065552 | 281 | LLGKIGDDYADLFTSAKNLYDAILLSGILIVDDNSTKAPLSASMIKRYVEHQEDLEKLKEFIKAN-KSELYHDIFKDKNK | 359 |
| WP_001040076 | 279 | LLGQIGDEFADLFSAAKKLYDSVLLSGILTVIDLSTKAPLSASMIQRYDEHREDLKQLKQFVKAS-LPEKYQEIVADSSK | 357 |
| WP_001040078 | 279 | LLGQIGDEFADLFSAAKKLYDSVLLSGILTVIDLSTKAPLSASMIQRYDEHREDLKQLKQFVKAS-LPEKYQEIFADSSK | 357 |
| WP_001040080 | 279 | LLGQIGDEFADLFSAAKKLYDSVLLSGILTVIDLSTKAPLSASMIQRYDEHREDLKQLKQFVKAS-LPEKYQEIFADSSK | 357 |
| WP_001040081 | 279 | LLGQIGDEFADLFSAAKKLYDSVLLSGILTVIDLSTKAPLSASMIQRYDEHREDLKQLKQFVKAS-LPEKYQEIFADSSK | 357 |
| WP_001040083 | 279 | LLGQIGDEFADLFSAAKKLYDSVLLSGILTVIDLSTKAPLSASMIQRYDEHREDLKQLKQFVKAS-LPEKYQEIFADSSK | 357 |
| WP_001040085 | 279 | LLGQIGDEFADLFSAAKKLYDSVLLSGILTVIDLSTKAPLSASMIQRYDEHREDLKQLKQFVKAS-LPEKYQEIFADSSK | 357 |
| WP_001040087 | 279 | LLGQIGDEFADLFSAAKKLYDSVLLSGILTVIDLSTKAPLSASMIQRYDEHREDLKQLKQFVKAS-LPEKYQEIFADSSK | 357 |
| WP_001040088 | 279 | LLGQIGDEFADLFSAAKKLYDSVLLSGILTVIDLSTKAPLSASMIQRYDEHREDLKQLKQFVKAS-LPEKYQEIFADSSK | 357 |
| WP_001040089 | 279 | LLGQIGDEFADLFSAAKKLYDSVLLSGILTVIDLSTKAPLSASMIQRYDEHREDLKQLKQFVKAS-LPEKYQEIFADSSK | 357 |
| WP_001040090 | 279 | LLGQIGDEFADLFSAAKKLYDSVLLSGILTVIDLSTKAPLSASMIQRYDEHREDLKQLKQFVKAS-LPEKYQEIFADSSK | 357 |
| WP_001040091 | 279 | LLRQIGDEFADLFSAAKKLYDSVLLSGILTVIDLSTKAPLSASMIQRYDEHREDLKQLKQFVKAS-LPEKYQEIFADSSK | 357 |
| WP_001040092 | 279 | LLGQIGDEFADLFSAAKKLYDSVLLSGILTVIDLSTKAPLSAYMIQRYDEHREDLKQLKQFVKAS-LPEKYQEIFADSSK | 357 |
| WP_001040094 | 279 | LLGQIGDEFADLFSAAKKLYDSVLLSGILTVIDLSTKAPLSASMIQHYDEHREDLKQLKQFVKAS-LPEKYQEIFADSSK | 357 |
| WP_001040095 | 279 | LLGQIGDEFADLFSAAKKLYDSVLLSGILTVIDLSTKAPLSASMIQRYDEHREDLKQLKQFVKAS-LPEKYQEIFADSSK | 357 |
| WP_001040096 | 279 | LLGQIGDEFADLFSAAKKLYDSVLLSGILTVIDLSTKAPLSASMIQRYDEHREDLKQLKQFVKAS-LPEKYQEIFADSSK | 357 |
| WP_001040097 | 279 | LLGQIGDEFADLFSAAKKLYDSVLLSGILTVIDLSTKAPLSASMIQRYDEHREDLKQLKQFVKAS-LPEKYQEIFADSSK | 357 |
| WP_001040098 | 279 | LLGQIGDEFADLFSAAKKLYDSVLLSGILTVIDLSTKAPLSASMIQRYDEHREDLKQLKQFVKAS-LPEKYQEIFADSSK | 357 |
| WP_001040099 | 279 | LLGQIGDEFADLFSAAKKLYDSVLLSGILTVIDLSTKAPLSASMIQRYDEHREDLKQLKQFVKAS-LPEKYQEIFADSSK | 357 |
| WP_001040100 | 279 | LLGQIGDEFADLFSAAKKLYDSVLLSGILTVIDLSTKAPLSASMIQRYDEHREDLKQLKQFVKAS-LPEKYQEIFADSSK | 357 |
| WP_001040104 | 279 | LLGQIGDEFADLFSAAKKLYDSVLLSGILTVIDLSTKAPLSASMIQRYDEHREDLKQLKQFVKAS-LPEKYQEIFADSSK | 357 |
| WP_001040105 | 279 | LLGQIGDEFADLFSAAKKLYDSVLLSGILTVIDLSTKAPLSASMIQRYDEHREDLKQLKQFVKAS-LPEKYQEIFADSSK | 357 |
| WP_001040106 | 279 | LLGQIGDEFADLFSVAKKLYDSVLLSGILTVIDLSTKAPLSASMIQRYDEHREDLKQLKQFVKAS-LPEKYQEIFTDSSK | 357 |
| WP_001040107 | 279 | LLGQIGDEFADLFSVAKKLYDSVLLSGILTVIDLSTKAPLSASMIQRYDEHREDLKQLKQFVKAS-LPEKYQEIFTDSSK | 357 |
| WP_001040108 | 279 | LLGQIGDEFADLFSVAKKLYDSVLLSGILTVIDLSTKAPLSASMIQRYDEHREDLKQLKQFVKAS-LPEKYQEIFTDSSK | 357 |
| WP_001040109 | 279 | LLGQIGDEFADLFSVAKKLYDSVLLSGILTVIDLSTKAPLSASMIQRYDEHREDLKQLKQFVKAS-LPEKYQEIFTDSSK | 357 |
| WP_001040110 | 279 | LLGQIGDEFADLFSVAKKLYDSVLLSGILTVIDLSTKAPLSASMIQRYDEHREDLKQLKQFVKAS-LPEKYQEIFTDSSK | 357 |
| WP_015058523 | 279 | LLGQIGDEFADLFSAAKKLYDSVLLSGILTVIDLSTKAPLSASMIQRYDEHREDLKQLKQFVKAS-LPEKYQEIFADSSK | 357 |
| WP_017643650 | 279 | LLGQIGDEFADLFSAAKKLYDSVLLSGILTVIDLSTKAPLSASMIQRYDEHREDLKQLKQFVKAS-LPEKYQEIFADSSK | 357 |
| WP_017647151 | 279 | LLGQIGDEFADLFSVAKKLYDSVLLSGILTVIDLSTKAPLSASMIQRYDEHREDLKQLKQFVKAS-LPEKYQEIFTDSSK | 357 |
| WP_017648376 | 279 | LLGQIGDEFADLFSVAKKLYDSVLLSGILTVIDLSTKAPLSASMIQRYDEHREDLKQLKQFVKAS-LPEKYQEIFTDSSK | 357 |
| WP_017649527 | 279 | LLGQIGDEFADLFSAAKKLYDSVLLSGILTVIDLSTKAPLSASMIQRYDEHREDLKQLKQFVKAS-LPEKYQEIFADSSK | 357 |
| WP_017771611 | 279 | LLGQIGDEFADLFSVAKKLYDSVLLSGILTVTALSTKAPLSASMIQRYDEHREDLKQLKQFVKAS-LPEKYQEIFTDSSK | 357 |
| WP_017771984 | 279 | LLGQIGDEFADLFSAAKKLYDSVLLSGILTVIDLSTKAPLSASMIQRYDEHREDLKQLKQFVKAS-LPEKYQEIFADSSK | 357 |
| CFQ25032 | 279 | LLGQIGDEFADLFSAAKKLYDSVLLSGILTVIDLSTKASLSDSMIQRYDEHREDLKQLKQFVKAS-LPEKYQEIFADSSK | 357 |
| CFV16040 | 279 | LLGQIGDEFADLFSAAKKLYDSVLLSGILTVIDLSTKAPLSASMIQRYDEHREDLKQLKQFVKAS-LPEKYQEIFADSSK | 357 |
| KLJ37842 | 279 | LLGQIGDEFADLFSAAKKLYDSVLLSGILTVIDLSTKAPLSASMIQRYDEHREDLKQLKQFVKAS-LPEKYQEIFADSSK | 357 |
| KLJ72361 | 279 | LLGQIGDEFADLFSAAKKLYDSVLLSGILTVIDLSTKAPLSASMIQRYDEHREDLKQLKQFVKAS-LPEKYQEIFADSSK | 357 |
| KLL20707 | 279 | LLGQIGDEFADLFSAAKKLYDSVLLSGILTVIDLSTKAPLSASMIQRYDEHREDLKQLKQFVKAS-LPEKYQEIFADSSK | 357 |
| KLL42645 | 279 | LLGQIGDEFADLFSVAKKLYDSVLLSGILTVIDLSTKAPLSASMIQRYDEHREDLKQLKQFVKAS-LPEKYQEIFTDSSK | 357 |
| WP_047207273 | 279 | LLGQIGDEFADLFSAAKKLYDSVLLSGILTVIDLSTKAPLSASMIQRYDEHREDLKQLKQFVKAS-LPEKYQEIFADSSK | 357 |
| WP_047209694 | 279 | LLGQIGDEFADLFSAAKKLYDSVLLSGILTVIDLSTKAPLSASMIQRYDEHREDLKQLKQFVKAS-LPEKYQEIFADSSK | 357 |
| WP_050198062 | 279 | LLGQIGDEFADLFSAAKKLYDSVLLSGILTVIDLSTKAPLSASMIQRYDEHREDLKQLKQFVKAS-LPEKYQEIFADSSK | 357 |
| WP_050201642 | 279 | LLGQIGDEFADLFSAAKKLYDSVLLSGILTVIDLSTKAPLSASMIQRYDEHREDLKQLKQFVKAS-LPEKYQEIFADSSK | 357 |
| WP_050204027 | 279 | LLGQIGDEFADLFSVAKKLYDSVLLSGILTVIDLSTKAPLSASMIQRYDEHREDLKQLKQFVKAS-LPEKYQEIFTDSSK | 357 |
| WP_050881965 | 279 | LLGQIGDEFADLFSAAKKLYDSVLLSGILTVIDLSTKAPLSASMIQRYDEHREDLKQLKQFVKAS-LPEKYQEIFADSSK | 357 |
| WP_050886065 | 279 | LLGQIGDEFADLFSAAKKLYDSVLLSGILTVIDLSTKAPLSASMIQRYDEHREDLKQLKQFVKAS-LPEKYQEIFADSSK | 357 |
| AHN30376 | 279 | LLGQIGDEFADLFSAAKKLYDSVLLSGILTVIDLSTKAPLSASMIQRYDEHREDLKQLKQFVKAS-LPEKYQEIFADSSK | 357 |
| EAO78426 | 279 | LLGQIGDEFADLFSAAKKLYDSVLLSGILTVIDLSTKAPLSASMIQRYDEHREDLKQLKQFVKAS-LPEKYQEIFADSSK | 357 |
| CCW42055 | 279 | LLGQIGDEFADLFSAAKKLYDSVLLSGILTVIDLSTKAPLSASMIQRYDEHREDLKQLKQFVKAS-LPEKYQEIFADSSK | 357 |
| WP_003041502 | 278 | LLGEVGDEYADLFASAKNLYDAILLSGILTVDDNSTKAPLSASMVKRYEEHQKDLKKFEDFIKVN-ALDQYNAIFKDKNK | 356 |
| WP_037593752 | 279 | LLGEIGDEYADLFASAKNLYDAILLSGILAVDDNITKAPLSASMVKRYEEHQKDLKKLKDFIKVN-APDQYNAIFKDKNK | 357 |
| WP_049516684 | 279 | LLGEIGDEYADLFASAKNLYDAILLSGILAVDDNITKAPLSASMVKRYEEHQKDLKKLKDFIKVN-APAQYDDIFKDETK | 357 |
| GAD46167 | 278 | LLGEIGDEYADLFASAKNLYDAILLSGILAVDDNITKAPLSASMVKRYEEHQKDLKKLKDFIKVN-APDQYNAIFKDKNK | 356 |
| WP_018363470 | 279 | LLGKIGDDYADLFTSSKNLYDAILLSGILTVDDNSTKAPLSASMIKRYVEHHEDLEKLKEFIKAN-KSELYHDIFKDKTQ | 357 |
| WP_003043819 | 278 | LLGQIGDQYADLFSAAKNLSDAILLSDILRSNSEVTKAPLSASMVKRYDEHHQDLALLKTLVRQQ-FPEKYAEIFKDDTK | 356 |
| WP_006269658 | 278 | FLGEVGDEYADLFASAKNLYDAILLSGILTVDDNSTKAPLSASMVKRYEEHQKDLKKLKDFIKVN-APDQYNAIFKDKNK | 356 |
| WP_048800889 | 278 | LLGKIGDDYADLFTSAKNLYDTILLSGILAVDDNSTKALLSASMIKRYEEHQKDLKKLKDFIKVN-APAQYDDIFKDETK | 356 |
| WP_012767106 | 278 | LLAQIGDQYADLFLAAKNLSDAILLSDILRVNSEITKAPLSASMIKRYDEHHQDLILLKALVRQQ-LPEKYKEIFFDQSK | 356 |
| WP_014612333 | 278 | LLAQIGNQYADLFLAAKNLSDAILLSDILRVNSEITKAPLSASMIKRYDEHHQDLILLKALVRQQ-LPEKYKEIFFDQSK | 356 |
| WP_015017095 | 278 | LLAQIGDQYADLFLAAKNLSDAILLSDILRVNSEITKAPLSASMIKRYDEHHQDLILLKALVRQQ-LPEKYKEIFFDQSK | 356 |
| WP_015057649 | 278 | LLAQIGDQYADLFLAAKNLSDAILLSDILRVNSEITKAPLSASMIKRYDEHHQDLILLKALVRQQ-LPEKYKEIFFDQSK | 356 |
| WP_048327215 | 278 | LLAQIGDQYADLFLAAKNLSDAILLSDILRVNSEITKAPLSASMIKRYDEHHQDLILLKALVRQQ-LPEKYKEIFFDQSK | 356 |
| WP_049519324 | 278 | LLAQIGDQYADLFLAAKNLSDAILLSDILRVNSEITKAPLSASMIKRYDEHHQDLILLKALVRQQ-LPEKYKEIFFDQSK | 356 |
| WP_012515931 | 278 | LLAQIGDQYADLFLAAKNLSDAILLSDILTESDEITRAPLSASMVKRYREHHKDLVTLKTLIKDQ-LPEKYQEIFLDKTK | 356 |
| WP_021320964 | 278 | LLAQIGDQYADLFLAAKNLSDAILLSDILTESDEITRAPLSASMVKRYREHHKDLVTLKTLIKDQ-LPEKYQEIFLDKTK | 356 |
| WP_037581760 | 278 | LLAQIGDQYADLFLAAKNLSDAILLSDILTESDEITRAPLSASMVKRYREHHKDLVTLKTLIKDQ-LPEKYQEIFLDKTK | 356 |
| WP_004232481 | 278 | LLGKIGDDYADLETAAKNLYDAILLSGILTVDDNSTKAPLSASMIKRYEEHHEDLEKLKTFIKVN-NEDKYHEIFKDKSK | 356 |
| WP_009854540 | 279 | LLGKIGDDYADLFTSAKNLYDAILLSGILTVDDNSTKAPLSASMIKRYVEHHEDLEKLKEFIKAN-KSELYHDIFKDKNK | 357 |
| WP_012962174 | 279 | LIGKIGDEYADLFTSAKNLYDAILLSGILTVADNITKAPLSASMIKRYNEHQVDLKKLKEFIKNN-ASDKYDEIFNDKDK | 357 |
| WP_039695303 | 279 | LLGKIGDDYADLFTSAKNLYDAILLSGILTVDDNSTKAPLSASMIKRYVEHHEDLEKLKEFIKAN-KSELYHDIFKDKNK | 357 |
| WP_014334983 | 278 | LLGKVGDDYADLFISAKNLYDAILLSGILTVDDNSTKAPLSASMIKRYVEHHEDLEKLKEFIKIN-KLKLYHDIFKDKIK | 356 |
| WP_003099269 | 278 | LLAQIGDQYADLFIAAKKLSDAILLSDIITVKGASTKAPLSASMVQRYEEHQQDLALLKNLVKKQ-IPEKYKEIFDNKEK | 356 |
| AHY15608 | 278 | LLAQIGDQYADLFIAAKKLSDAILLSDIITVKGASTKAPLSASMVQRYEEHQQDLALLKNLVKKQ-IPEKYKEIFDNKEK | 356 |
| AHY17476 | 278 | LLAQIGDQYADLFIAAKKLSDAILLSDIITVKGASTKAPLSASMVQRYEEHQQDLALLKNLVKKQ-IPEKYKEIFDNKEK | 356 |
| ESR09100 | | -------------------------------------------------------------------------------- | |
| AGM98575 | 278 | LLAQIGDQYADLFIAAKKLSDAILLSDIITVKGASTKAPLSASMVQRYEEHQQDLALLKNLVKKQ-IPEKYKEIFDNKEK | 356 |
| ALF27331 | 278 | LLAQIEDNYAELFLSAKKLYDSILLSGILTVTDVSTKAPLSASMIQRYNEHQMDLAQLKQFIRQK-LSDKYNEVFSDVSK | 356 |
| WP_018372492 | 276 | LLSKIDEEYAALFDLAKKVYDAVLLSNILTVKEKNTKAPLSASMIKRYEEHKDDLKAFKRFFRER-LPEKYETMEKDLTK | 354 |
| WP_045618028 | 279 | LLVQIGDDFADLELVAKKLYDAILLSGILTVTDPSTKAPLSASMIDRYENHQKDLAALKQFIKTN-LPEKYDEVESDQSK | 357 |
| WP_045635197 | 278 | LLGQIGDDFIDLEVSAKKLYDAILLSGILTVTDPSTKAPLSASMIERYENHQNDLAALKQFIKNN-LPEKYDEVESDQSK | 356 |
| WP_002263549 | 278 | LLAQIGDNYAELFLSAKKLYDSILLSGILTVTDVGTKAPLSASMIQRYNEHQMDLAQLKQFIRQK-LSDKYNEVFSDVSK | 356 |
| WP_002263887 | 278 | LLAQIGDNYAELFLSAKKLYDSILLSGILTVTDVGTKAPLSASMIQRYNEHQMDLAQLKQFIRQK-LSDKYNEVFSDVSK | 356 |
| WP_002264920 | 278 | LLGKIGDDYADLFTLAKNLYDAILLSGILTADDSSTKAPLSASMIKRYAEHHEDLEKLKEFIKAN-KPELYHDIFKDETK | 356 |
| WP_002269043 | 278 | LLAQIGDNYAELFLSAKKLYDSILLSGILTVTDVSTKAPLSASMIQRYNEHQMDLAQLKQFIRQK-LSDKYNEVFSDVSK | 356 |
| WP_002269448 | 278 | LLAQIGDNYAELFLSAKKLYDSILLSGILTVTDVSTKAPLSASMIQRYNEHQMDLAQLKQFIRQK-LSDKYNEVFSDVSK | 356 |
| WP_002271977 | 278 | LLGKIGDDYADLFTLAKNLYDAILLSGILTADDSSTKAPLSASMIQRYNEHQMDLAQLKQFIRQK-LSDKYNEVESDVSK | 356 |
| WP_002272766 | 278 | LLGKIGDDYADLFTLAKNLYDAILLSGILTADDSSTKAPLSASMIQRYNEHQMDLAQLKQFIRQK-LSDKYNEVESDVSK | 356 |
| WP_002273241 | 278 | LLAQIGDNYAELFLSAKKLYDSILLSGILTVTDVSTKAPLSASMIQRYNEHQMDLAQLKQFIRQK-LSDKYNEVFSDVSK | 356 |
| WP_002275430 | 278 | LLTQIGDNYAELFLSAKKLYDSILLSGILTVTDVSTKAPLSASMIQRYNEHQMDLAQLKQFIRQK-LSDKYNEVFSDVSK | 356 |
| WP_002276448 | 278 | LLAQIGDNYAELFLSAKKLYDSILLSGILTVTDVSTKAPLSASMIQRYNEHQMDLAQLKQFIRQK-LSDKYNEVFSDVSK | 356 |
| WP_002277050 | 278 | LLGKIGDDYADLFTLAKNLYDAILLSGILTADDSSTKAPLSASMIKRYAEHHEDLEKLKEFIKAN-KPELYHDIFKDETK | 356 |
| WP_002277364 | 278 | LLAQIGDNYAELFLSAKKLYDSILLSGILTVTDVSTKAPLSASMIQRYNEHQMDLAQLKQFIRQK-LSDKYNEVFSDVSK | 356 |
| WP_002279025 | 278 | LLAQIGDNYAELFLSAKKLYDSILLSGILTADDSSTKAPLSASMIQRYNEHQMDLAQLKQFIRQK-LSDKYNEVFSDVSK | 356 |
| WP_002279859 | 278 | LLAQIGDNYAELFLSAKKLYDSILLSGILTVTDVSTKAPLSASMIQRYNEHQMDLAQLKQFIRQK-LSDKYNEVFSDVSK | 356 |
| WP_002280230 | 278 | LLAQIGDNYAELFLSAKKLYDSILLSGILTVTDVSTKAPLSASMIQRYNEHQMDLAQLKQFIRQK-LSDKYNEVFSDVSK | 356 |
| WP_002281696 | 278 | LLAQIGDNYAELFLSAKKLYDSILLSGILTVTDVSTKAPLSASMIQRYNEHQMDLAQLKQFIRQK-LSDKYNEVFSDVSK | 356 |
| WP_002282247 | 278 | LLGKIGDDYADLFTLAKNLYDAILLSGILTADDSSTKAPLSASMIKRYAEHHEDLEKLKEFIKAN-KPELYHDIFKDETK | 356 |
| WP_002282906 | 278 | LLAQIGDNYAELFLSAKKLYDSILLSGILTVTDVGTKAPLSASMIQRYNEHQMDLAQLKQFIRQK-LSDKYNEVFSDVSK | 356 |
| WP_002283846 | 278 | LLAQIGDNYAELFLSAKKLYDSILLSGILTVTDVSTKAPLSASMIQRYNEHQMDLAQLKQFIRQK-LSDKYNEVFSDVSK | 356 |
| WP_002287255 | 278 | LLAQIGDNYAELFLSAKKLYDSILLSGILTVTDVSTKAPLSASMIQRYNEHQMDLAQLKQFIRQK-LSDKYNEVFSDVSK | 356 |
| WP_002288990 | 278 | LLAQIGDNYAELFLSAKKLYDSILLSGILTVTDVSTKAPLSASMIQRYNEHQMDLAQLKQFIRQK-LSDKYNEVFSDVSK | 356 |
| WP_002289641 | 278 | LLAQIGDNYAELFLSAKKLYDSILLSGILTVTDVSTKAPLSASMIQRYNEHQMDLTQLKQFIRQK-LSDKYNEVFSDVSK | 356 |
| WP_002290427 | 278 | LLAQIGDNYAELFLSAKKLYDSILLSGILTVTDVSTKAPLSASMIQRYNEHQMDLAQLKQFIRQK-LSDKYNEVFSDVSK | 356 |
| WP_002295753 | 278 | LLAQIGDNYAELFLSAKKLYDSILLSGILTVTDVSTKAPLSASMIQRYNEHQMDLAQLKQFIRQK-LSDKYNEVFSDVSK | 356 |
| WP_002296423 | 278 | LLAQIGDNYAELFLSAKKLYDSILLSGILTVTDVSTKAPLSASMIQRYNEHQMDLAQLKQFIRQK-LSDKYNEVFSDVSK | 356 |
| WP_002304487 | 278 | LLGEIGDEYADLFASAKNLYDAILLSGILAVDDNITKAPLSASMVKRYKEHKEELAAFKRFIKEK-LPKKYEEIFKDDTK | 356 |
| WP_002305844 | 278 | LLAQIGDNYAELFLSAKKLYDSILLSGILTVTDVSTKAPLSASMIQRYNEHQMDLAQLKQFIRQK-LSDKYNEVFSDVSK | 356 |
| WP_002307203 | 278 | LLAQIGDNYAELFLSAKKLYDSILLSGILTVTDVSTKAPLSASMIQRYNEHQMDLAQLKQFIRQK-LSDKYNEVFSDVSK | 356 |
| WP_002310390 | 278 | LLAQIGDNYAELFLSAKKLYDSILLSGILTVTDVSTKAPLSASMIQRYNEHQMDLAQLKQFIRQK-LSDKYNEVFSDVSK | 356 |
| WP_002352408 | 278 | LLAQIGDNYAELFLSAKKLYDSILLSGILTVTDVSTKAPLSASMIQRYNEHQMDLAQLKQFIRQK-LSDKYNEVFSDVSK | 356 |
| WP_012997688 | 278 | LLAQIGDNYAELFLSAKKLYDSILLSGILTVTDVSTKAPLSASMIQRYNEHQMDLAQLKQFIRQK-LSDKYNEVFSDVSK | 356 |
| WP_014677909 | 278 | LLAQIGDNYAELFLSAKKLYDSILLSGILTVTDVSTKAPLSASMIQRYNEHQMDLAQLKQFIRQK-LSDKYNEVFSDVSK | 356 |
| WP_019312892 | 278 | LLAQIGDNYAELFLSAKKLYDSILLSGILTVTDVSTKAPLSASMIQRYNEHQMDLAQLKQFIRQK-LSDKYNEVFSDVSK | 356 |
| WP_019313659 | 278 | LLAQIGDNYAELFLSAKKLYDSILLSGILTVTDVGTQAPLSASMIQRYNEHQMDLAQLKQFIRQK-LSDKYNEVFSDVSK | 356 |
| WP_019314093 | 278 | LLAQIGDNYAELFLSAKKLYDSILLSGILTVTDVSTKAPLSASMIQRYNEHQMDLAQLKQFIRQK-LSDKYNEVFSDVSK | 356 |
| WP_019315370 | 278 | LLAQIGDNYAELFLSAKKLYDSILLSGILTVTDVSTKAPLSASMIQRYNEHQMDLTQLKQFIRQK-LSDKYNEVFSDVSK | 356 |
| WP_019803776 | 278 | LLAQIGDNYAELFLSAKKLYDSILLSGILTVTDVGTKAPLSASMIQRYNEHQMDLAQLKQFIRQK-LSDKYNEVFSDVSK | 356 |
| WP_019805234 | 278 | LLAQIGDNYAELFLSAKKLYDSILLSGILTVTDVSTKAPLSASMIQRYNEHQMDLAQLKQFIRQK-LSDKYNEVFSDVSK | 356 |
| WP_024783594 | 278 | LLAQIGDNYAELFLSAKKLYDSILLSGILTVTDVGTKAPLSASMIQRYNEHQMDLAQLKQFIRQK-LSDKYNEVFSDVSK | 356 |
| WP_024784288 | 278 | LLGKIGDDYADLFTLAKNLYDAILLSGILTADDSSTKAPLSASMIKRYAEHHEDLEKLKEFIKAN-KPELYHDIFKDETK | 356 |
| WP_024784666 | 278 | LLAQIGDNYAELFLSAKKLYDSILLSGILTVTDVSTKAPLSASMIQRYNEHQMDLVQLKQFIRQK-LSDKYNEVFSDVSK | 356 |
| WP_024784894 | 278 | LLAQIGDNYAELFLSAKKLYDSILLSGILTVTDVSTKAPLSASMIQRYNEHQMDLTQLKQFIRQK-LSDKYNEVFSDVSK | 356 |
| WP_024786433 | 278 | LLGKIGDDYADLFTLAKNLYDAILLSGILTADDSSTKAPLSASMIKRYAEHHEDLEKLKEFIKAN-KPELYHDIFKDETK | 356 |
| WP_049473442 | 278 | LLGKIGDDYADLFTLAKNLYDAILLSGILTADDSSTKAPLSASMIQRYNEHQMDLAQLKQFIRQK-LSDKYNEVFSDVSK | 356 |
| WP_049474547 | 278 | LLAQIGDNYAELFLSAKKLYDSILLSGILTVIDVSTKAPLSASMIQRYNEHQMDLTQLKQFIRQK-LSDKYNEVFSDVSK | 356 |
| EMC03581 | 271 | LLAQIGDNYAELFLSAKKLYDSILLSGILTVIDVSTKAPLSASMIQRYNEHQMDLAQLKQFIRQK-LSDKYNEVFSDVSK | 349 |
| WP_000428612 | 279 | LLGQIGDDFADLEVAAKKLYDAILLSGILTVIDPSTKAPLSASMIERYENHQKDLATLKQFIKTN-LPEKYDEVFSDQSK | 357 |
| WP_000428613 | 279 | LLGQIGDDFADLFLVAKKLYDAILLSGILTVIDPSTKAPLSASMIERYENHQKDLAVLKQFIKNN-LPEKYDEVFSDQSK | 357 |
| WP_049523028 | 278 | LLGQIGDVYADLFVVAKKLYDAILLAGILSVKDPGIKAPLSASMIERYDNHQNDLSALKQFVRRN-LPEKYAEVFSDDSK | 356 |
| WP_003107102 | 247 | LLAQIGDQYADLFIAAKNLSDAILLSDILTVKGVNTKAPLSASMVQRFNEHQDDLKLLKKLVKVQ-LPEKYKEIFDIKDK | 325 |
| WP_054279288 | 280 | LLTQIGDEYADLELSAKNLSDAILLSDILIVNGDGIQAPLSASLIKRYEEHRQDLALLKQMFKEQ-LPDLYRDVFIDENK | 358 |
| WP_049531101 | 279 | LLGQIGDDFADLFLVAKKLYDAILLSGILTVIDPSTKAPLSASMIERYENHQKDLAALKQFIKNN-LPEKYDEVFSDQSK | 357 |
| WP_049538452 | 279 | LLGQIGDGFADLFLVAKKLYDAILLSGILTVIDPSTKAPLSASMIERYQNHQNDLASLKQFIKNN-LPEKYDEVFSDQSK | 357 |
| WP_049549711 | 279 | LLGQIGDDFADLFLVAKKLYDAILLSGILTVIDPSTKAPLSASMIERYENHQKDLITLKQFIKNN-LPEKYDEVFSDQSK | 357 |
| WP_007896501 | 280 | LLAEIGDHYADLFLAAKNLSDAILLSDILTLSDENTRAPLSASMIKRYEEHQEDLALLKKLVKEQ-MPEKYWEIFSNAKK | 358 |
| EFR44625 | 232 | LLAEIGDHYADLFLAAKNLSDAILLSDILTLSDENTRAPLSASMIKRYEEHQEDLALLKKLVKEQ-MPEKYWEIFSNAKK | 310 |
| WP_002897477 | 278 | LLGQIGDDFADLFLIAKKLYDAILLSGILTVIDPSTKAPLSASMIERYENHQKDLAALKQFIKNN-LPEKYVEVFSDQSK | 356 |
| WP_002906454 | 278 | LLGQIGDGFADLFLVAKKLYDAILLSGILTVIDPSTKAPLSASMIERYENHQEDLAALKQFIKNN-LSEKYAEVFSDQSK | 356 |
| WP_009729476 | 279 | LLGQIGDDFADLFLVAKKLYDAILLSGILTVINPSTKAPLSASMIERYENHQKDLASLKQFIKNN-LPEKYDEVFSDQSE | 357 |
| CQR24647 | 278 | LLGIIGDEYADVFVAAKKVYDSILLSGILTINNHSTKAPLSASMIDRYDEHNSDKKLLRDFIRTNiGKEVFKEVFYDISK | 357 |
| WP_000066813 | 279 | LLGQIGDDFADLFLVAKKLYDAILLSGILTVKDLSTKAPLSASMIERYENHQKDLAALKQFIQNN-LQEKYDEVFSDQSK | 357 |
| WP_009754323 | 279 | LLGQIGDDFADLFLVAKKLYDAILLSGILTVIDPSTKAPLSASMIERYENHQEDLAALKQFIKNN-LPEKYAEVFSDQSK | 357 |
| WP_044674937 | 278 | LLGKIGDDYADLFIATKSLYDGILLAGILSTIDSTIKAPLSSSMVNRYEEHKKDLALLKNFIHQN-LSDSYKEVFNDKLK | 356 |
| WP_044676715 | 278 | LLGKIGDDYADLFIATKSLYDGILLAGILSTIDSTIKAPLSSSMVNRYEEHQKDLALLKNFIHQN-LSDSYKEVFNDKLK | 356 |
| WP_044680361 | 278 | LLGKIGDDYADLFIATKSLYDGILLAGILSTIDSTIKAPLSSSMVNRYEEHQKDLALLKNFIHQN-LSDSYKEVFNDKLK | 356 |
| WP_044681799 | 278 | LLGKIGDDYADLFIATKSLYDGILLAGILSTIDSTIKAPLSSSMVNRYEEHKKDLALLKNFIHQN-LSDSYKEVFNDKLK | 356 |
| WP_049533112 | 278 | LLGEIGDEYADLFASAKNLYDAILLSGILTVDDNSTKAPLSASMVKRYEEHQKDLKKLKDFIKVN-APDQYNAIFKDKNK | 356 |
| WP_029090905 | 244 | LADVLADEEYDLLLTAQKIYSAIILDESMDGYEYFA-----EAKKESYRKHQEELVLVKKMLKSNaIINDERAKF---EY | 315 |
| WP_006506696 | 284 | VEKDLGE-YVEFVDALHNVYSWVELQIIMGATHTD-NASISEAMVSRYNKHHDDLKLLKDCIKNN-VPNKYFDMERNDSE | 360 |
| AIT42264 | 278 | LLAQIGDQYADLFLAAKNLSDAILLSDILRVNTEITKAPLSASMIKRYDEHHQDLILLKALVRQQ-LPEKYKEIFFDQSK | 356 |
| WP_034440723 | 284 | LLSNIDEGYRDVFLQAKNVYNAIELSKILKIDGKETKAPLSAQMVELYNQHREDLKKYKDYIKAY-LPEKYGETFKDATK | 362 |
| AKQ21048 | 278 | LLAQIGDQYADLFLAAKNLSDAILLSDILRVNTEITKAPLSASMIKRYDEHHQDLILLKALVRQQ-LPEKYKEIFFDQSK | 356 |
| WP_004636532 | 277 | LLGMTDDVFLDVFMAAKNVYDAVEMSAIISTDIGNSKAVLSNQMINFYDEHKVDLAQLKQFFKTH-LPDKYYECFSDPSK | 355 |
| WP_002364836 | 284 | ILAKVGDEYSDVFLAAKNVYDAVELSTILADSDKKSHAKLSSSMIVRFTEHQEDLKKFKRFIREN-CPDEYDNLFKNEQK | 362 |
| WP_016631044 | 235 | ILAKVGDEYSDVFLAAKNVYDAVELSTILADSDKKSHAKLSSSMIVRFTEHQEDLKKFKRFIREN-CPDEYDNLFKNEQK | 313 |
| EMS75795 | 21 | LLEKSGEEFRDVFLQAKKVYDAILLSDILSIKKQNSKAKLSLGMIERYDSHKKDLEELKQFVKAN-LPEKTAIFFKDSSK | 99 |
| WP_002373311 | 284 | ILAKVGDEYSDVFLAAKNVYDAVELSTILADSDKKSHAKLSSSMIVRFTEHQEDLKKFKRFIREN-CPDEYDNLFKNEQK | 362 |
| WP_002378009 | 284 | ILAKVGDEYSDVFLAAKNVYDAVELSTILADSDKKSHAKLSSSMIVRFTEHQEDLKNFKRFIREN-CPDEYDNLFKNEQK | 362 |
| WP_002407324 | 284 | ILAKVGDEYSDVFLAAKNVYDAVELSTILADSDKKSHAKLSSSMIVRFTEHQEDLKNFKRFIREN-CPDEYDNLFKNEQK | 362 |
| WP_002413717 | 284 | ILAKVGDEYSDVFLAAKNVYDAVELSTILADSDKKSHAKLSSSMIVRFTEHQEDLKKFKRFIREN-CPDEYDNLFKNEQK | 362 |
| WP_010775580 | 286 | ILAKVGDEYSDVFLAAKNVYDAVELSTILADSDKKSHAKLSSSMIVRFTEHQEDLKNFKRFIREN-CPDEYDNLFKNEQK | 364 |
| WP_010818269 | 284 | ILAKVGDEYSDVFLAAKNVYDAVELSTILADSDKKSHAKLSSSMIVRFTEHQEDLKKFKRFIREN-CPDEYDNLFKNEQK | 362 |
| WP_010824395 | 284 | ILAKVGDEYSDVFLAAKNVYDAVELSTILADSDKKSHAKLSSSMIVRFTEHQEDLKNFKRFIREN-CPDEYDNLFKNEQK | 362 |
| WP_016622645 | 284 | ILAKVGDEYSDVFLAAKNVYDAVELSTILADSDKKSYAKLSSSMIVRFTEHQEDLKKFKRFIREN-CPDEYDNLFKNEQK | 362 |
| WP_033624816 | 284 | ILAKVGDEYSDVFLAAKNVYDAVELSTILADSDKKSHAKLSSSMIVRFTEHQEDLKNFKRFIREN-CPDEYDNLFKNEQK | 362 |
| WP_033625576 | 284 | ILAKVGDEYSDVFLAAKNVYDAVELSTILADSDKKSHAKLSSSMIVRFTEHQEDLKKFKRFIREN-CPDEYDNLFKNEQK | 362 |
| WP_033789179 | 284 | ILAKVGDEYSDVFLAAKNVYDAVELSTILADSDKKSHAKLSSSMIVRFTEHQEDLKNFKRFIREN-CPDEYDNLFKNEQK | 362 |
| WP_002310644 | 282 | LLEKIGDDYIDLFVQAKNVYDAVLLSEILSDSTKNTRAKLSAGMIRRYDAHKEDLVLLKRFVKEN-LPKKYRAFFGDNSV | 360 |
| WP_002312694 | 283 | LLEKIGDDYIDLFVQAKNVYDAVLLSEILSDSTKNTRAKLSAGMIRRYDAHKEDLVLLKRFVKEN-LPKKYRAFFGDNSV | 361 |
| WP_002314015 | 283 | LLEKIGDDYIDLFVQAKNVYDAVLLSEILSDSTKNTRAKLSAGMIRRYDAHKEDLVLLKRFVKEN-LPKKYRAFFGDNSV | 361 |
| WP_002320716 | 283 | LLEKIGDDYIDLFVQAKNVYDAVLLSEILSDSTKNTRAKLSAGMIRRYDAHKEDLVLLKRFVKEN-LPKKYRAFFGDNSV | 361 |
| WP_002330729 | 282 | LLEKIGDDYIDLFVQAKNVYDAVLLSEILSDSTKNTRAKLSAGMIRRYDAHKEDLVLLKRFVKEN-LPKKYRAFFGDNSV | 360 |
| WP_002335161 | 283 | LLEKIGDDYIDLFVQAKNVYDAVLLSEILSDSTKNTRAKLSAGMIRRYDAHKEDLVLLKRFVKEN-LPKKYRAFFGDNSV | 361 |
| WP_002345439 | 283 | LLEKIGDDYIDLFVQAKNVYDAVLLSEILSDSTKNTRAKLSAGMIRRYDAHKEDLVLLKRFVKEN-LPKKYRAFFGDNSV | 361 |
| WP_034867970 | 276 | LLEKIGDEYLDIFLQAKKVHDAILLSEIISSIVKHTKAKLSSGMVERYERHKADLAKFKQFVKEN-VPQKATVFFKDITK | 354 |
| WP_047937432 | 283 | LLEKIGDDYIDLFVQAKNVYDAVLLSEILSDSTKNTRAKLSAGMIRRYDAHKEDLVLLKRFVKEN-LPKKYRAFFGDNSV | 361 |
| WP_010720994 | 276 | LLEKIGDEYLDIFLQAKKVHDAILLSEIISSIVKHTQAKLSSGMVERYERHKADLAKFKQFVKEN-VPQKATVFFKDITK | 354 |
| WP_010737004 | 276 | LLEKIGDEYLDIFLQAKKVHDAILLSEIISSIVKHTKAKLSSGMVERYERHKADLAKFKQFVKEN-VPQKATVFFKDITK | 354 |
| WP_034700478 | 276 | LLEKIGDEYLDIFLQAKKVHDAILLSEIISSIVKHTQAKLSSGMVERYERHKADLAKFKQFVKEN-VPQKATVFFKDITK | 354 |
| WP_007209003 | 281 | LLAIIGDEYGDIFVAAQNLYQAILLAGILTSTEK-TRAKLSASMIQRYEEHAKDLKLLKRFVKEH-IPDKYAEIFNDATK | 358 |
| WP_023519017 | 276 | LLEKTSDDYAELFLKAKGVYDAILLSQILSKSDDETKAKLSANMKLRFEEHQRDLKQLKELVRRD-LPKKYDDFFKNRSK | 354 |
| WP_010770040 | 279 | LLAIIGDEYAEIFSATKSVYDAVALSGILSVIDGDTKAKLSASMVERYEAHQKDLVQFKQFIRKE-LPEMYAPIERDNSV | 357 |
| WP_048604708 | 275 | LLGEIGDEYADVFEAAKNVYNAVELSGILTVIDNSTKAKLSASMIKRYEDHKIDLKLEKEFIRKN-LPEKYHEIENDKNT | 353 |
| WP_010750235 | 276 | LLRKSNEEMIDVFLQVKKVYDAILLSDILSTKMKDTKAKLSAGMIERYQNHKKDLEELKQFVRAH-LHEKVIVFFKDSSK | 354 |
| AII16583 | 317 | LLAQIGDQYADLFLAAKNLSDAILLSDILRVNTEITKAPLSASMIKRYDEHHQDLILLKALVRQQ-LPEKYKEIFFDQSK | 395 |
| WP_029073316 | 290 | KQPLLGD-CVEFIDLLHDIYSWVELQNILGSAHTS-EPSISAAMIQRYEDHKNDLKLLKDVIRKY-LPKKYFEVERDEKS | 366 |
| WP_031589969 | 290 | KQPLLGD-CVEFIDLLHDIYSWVELQNILGSAHTS-EPSISAAMIQRYEDHKNDLKLLKDVIRKY-LPKKYFEVERDEKS | 366 |
| KDA45870 | 276 | LLAEAGDQYLDIEVAAKKVYDAAILASILDVKDTQTKIVESQAMIERYEEHQKDLIELKRVEKKY-LPEKCHDFFSE-PK | 353 |
| WP_039099354 | 286 | LESSLDDNAHQIIESLQELYSGVLLAGIVPENQSLS-----QAMITKYDDHQKHLKMLKAVREAL-APEDRQRLKQAYDQ | 359 |
| AKP02966 | 279 | LDSILDDDQFTVLDTANRIYSTITLNEIL-----NGESYFSMAKVNQYENHAIDLCKLRDMWHTT----KNEKAV-GLSR | 348 |
| WP_010991369 | 284 | LLALIGDEYAELEVAAKNAYSAVVLSSIITVAETETNAKLSASMIERFDTHEEDLGELKAFIKLH-LPKHYEEIFSNTEK | 362 |
| WP_033838504 | 284 | LLALIGDEYAELEVAAKNAYSAVVLSSIITVAETETNAKLSASMIERFDTHEEDLGELKAFIKLH-LPKHYEEIFSNTEK | 362 |
| EHN60060 | 287 | LLALIGDEYAELEVAAKNAYSAVVLSSIITVAETETNAKLSASMIERFDTHEEDLGELKAFIKLH-LPKHYEEIFSNTEK | 365 |
| EFR89594 | 53 | LLALIGDEYAELEVAAKNAYSAVVLSSIITVAETETNAKLSASMIERFDTHEEDLGELKAFIKLH-LPKHYEEIFSNTEK | 131 |
| WP_038409211 | 284 | LLAKIGDEYAEIEVAAKSTYNAVVLSNIITVIDTETKAKLSASMIERFDKHAKDLKRLKAFFKMQ-LPEKENEVENDIEK | 362 |
| EFR95520 | | -------------------------------------------------------------------------------- | |
| WP_003723650 | 284 | LLAIIGDEYAELEVAAKNTYNAVVLSSIITVIDTETNAKLSASMIERFDAHEKDLVELKAFIKLN-LPKQYEEIFSNAAI | 362 |
| WP_003727705 | 284 | LLAIIGDEYAELEVAAKNTYNAVVLSSIITVTATETNAKLSASMIERFDAHEKELGELKAFIKLH-LPKQYQEIENNAEI | 362 |
| WP_003730785 | 284 | LLAIIGDEYAELEVAAKNTYNAVVLSSIITVTATETNAKLSASMIERFDAHEKELGELKAFIKLH-LPKQYQEIENNAEI | 362 |
| WP_003733029 | 284 | LLAIIGDEFAEVEVAAKNAYNAVVLSNIITVIDSTTRAKLSASLIERFENHKEDLKKMKRFVRTY-LPEKYDEIFDDTEK | 362 |
| WP_003739838 | 284 | LLAIIGDEYAELEVAAKNTYNAVVLSSIITVIDTETNAKLSASMIERFDAHEKDLSELKAFIKLH-LPKQYEEIFSNVAI | 362 |
| WP_014601172 | 284 | LLAIIGDEYAELFVAAKNTYNAVVLSSIITVTATETNAKLSASMIERFDAHEKDLGELKAFIKLH-LPKQYQEIFNNAAI | 362 |
| WP_023548323 | 284 | LLAIIGDEYAELFVAAKNTYNAVVLSSIITVTDTETNAKLSASMIERFDAHEKDLVELKAFIKLN-LPKQYEEIFSNAAI | 362 |
| WP_031665337 | 284 | LLAIIGDEYAELFVAAKNTYNAVVLSSIITVNDTETNAKLSASMIERFDAHEKDLVELKAFIKLN-LPKQYEEIFSNAAI | 362 |
| WP_031669209 | 284 | LLAIIGDEFAEVFVAAKNAYNAVVLSNIITVTDSTTRAKLSASLIERFENHKEDLKKMKRFVRTY-LPEKYDEIFDDTEK | 362 |
| WP_033920898 | 284 | LLAIIGDEYAELFVAAKNTYNAVVLSSIITVTDTETNAKLSASMIERFDAHEKDLVELKAFIKLN-LPKQYEEIFSNAAI | 362 |
| AKI42028 | 287 | LLAIIGDEYAELFVAAKNTYNAVVLSSIITVTATETNAKLSASMIERFDAHEKDLGELKAFIKLH-LPKQYQEIFNNAAI | 365 |
| AKI50529 | 287 | LLAIIGDEYAELFVAAKNTYNAVVLSSIITVTDTETNAKLSASMIERFDAHEKDLVELKAFIKLN-LPKQYEEIFSNAAI | 365 |
| EFR83390 | | -------------------------------------------------------------------------------- | |
| WP_046323366 | 284 | LLARVGDEYAEIFVAAKNAYNAVVLSSIITVSNTETKAKLSASMIERFDKHDKDLKRMKAFFKVR-LPENFNEVENDVEK | 362 |
| AKE81011 | 294 | LLAQIGDQYADLFLAAKNLSDAILLSDILRVNTEITKAPLSASMIKRYDEHHQDLTLLKALVRQQ-LPEKYKEIFFDQSK | 372 |
| CUO82355 | 288 | VENDLGE-YVEFIDSLHNIYSWVELQTIMGATHTD-NASISEAMVSRYNKHHEDLQLLKKCIKDN-VPKKYFDMERNDSE | 364 |
| WP_033162887 | 289 | LQSELGE-YIEFIEMLHNIYSWVELQAILGATHTD-NPSISAAMVERYEEHKKDLRVLKKVIREE-LPDKYNEVFRKDNR | 365 |
| AGZ01981 | 311 | LLAQIGDQYADLFLAAKNLSDAILLSDILRVNTEITKAPLSASMIKRYDEHHQDLTLLKALVRQQ-LPEKYKEIFFDQSK | 389 |
| AKA60242 | 278 | LLAQIGDQYADLFLAAKNLSDAILLSDILRVNTEITKAPLSASMIKRYDEHHQDLTLLKALVRQQ-LPEKYKEIFFDQSK | 356 |
| AKS40380 | 278 | LLAQIGDQYADLFLAAKNLSDAILLSDILRVNTEITKAPLSASMIKRYDEHHQDLTLLKALVRQQ-LPEKYKEIFFDQSK | 356 |
| 4UN5_B | 282 | LLAQIGDQYADLFLAAKNLSDAILLSDILRVNTEITKAPLSASMIKRYDEHHQDLTLLKALVRQQ-LPEKYKEIFFDQSK | 360 |
| WP_010922251 | 357 | [chemical structure] | 419 |
| WP_039695303 | 358 | --NGYAG YIEN G VKQDEFYKYLKNILSK-IkiDGSDYFL--DKIEREDFLRKQRTFDNGSIPHQIHLQEM | 422 |
| WP_045635197 | 357 | --DGYAG YIDG K TIQETFYKYIKNLLSK-F--EGTDYFL--DKIEREDFLRKQRTFDNGSIPHQIHLQEM | 419 |
| 5AXW_A | 169 | ------G SINR - ---------------K------TSDYVk----------------------------EA | 183 |
| WP_009880683 | 41 | --NGYAG YIDG G ASQEEFYKFIKPILEK-M--DGTEELLa--KLNREDLLRKQRTFDNGSIPHQIHLGEL | 103 |
| WP_010922251 | 357 | --NGYAG YIDG G ASQEEFYKFIKPILEK-M--DGTEELLv--KLNREDLLRKQRTEDNGSIPHQIHLGEL | 419 |
| WP_011054416 | 357 | --NGYAG YIDG G ASQEEFYKFIKPILEK-M--DGTEELLa--KLNREDLLRKQRTFDNGSIPYQIHLGEL | 419 |
| WP_011284745 | 357 | --NGYAG YIDG G ASQEEFYKFIKPILEK-M--DGTEELLa--KLNREDLLRKQRTFDNGSIPHQIHLGEL | 419 |
| WP_011285506 | 357 | --NGYAG YIDG G ASQEEFYKFIKPILEK-M--DGTEELLv--KLNREDLLRKQRTEDNGSIPHQIHLGEL | 419 |
| WP_011527619 | 357 | --NGYAG YIDG G ASQEEFYKFIKPILEK-M--DGTEELLa--KLNREDLLRKQRTFDNGSIPHQIHLGEL | 419 |
| WP_012560673 | 357 | --NGYAG YIDG G ASQEEFYKFIKPILEK-M--DGTEELLa--KLNREDLLRKQRTFDNGSIPHQIHLGEL | 419 |
| WP_014407541 | 357 | --NGYAG YIDG G ASQEEFYKFIKPILEK-M--DGTEELLv--KLNREDLLRKQRTEDNGSIPHQIHLGEL | 419 |
| WP_020905136 | 357 | --NGYAG YIDG G ASQEEFYKFIKPILEK-M--DGTEELLa--KLNREDLLRKQRTFDNGSIPHQIHLGEL | 419 |
| WP_023080005 | 357 | --NGYAG YIDG G ASQEEFYKFIKPILEK-M--DGTEELLa--KLNREDLLRKQRTFDNGSIPYQIHLGEL | 419 |
| WP_023610282 | 357 | --NGYAG YIDG G ASQEEFYKFIKPILEK-M--DGTEELLa--KLNREDLLRKQRTFDNGSIPYQIHLGEL | 419 |
| WP_030125963 | 357 | --NGYAG YIDG G ASQEEFYKFIKPILEK-M--DGTEELLv--KLNREDLLRKQRTEDNGSIPHQIHLGEL | 419 |
| WP_030126706 | 357 | --NGYAG YIDG G ASQEEFYKFIKPILEK-M--DGTEELLa--KLNREDLLRKQRTFDNGSIPYQIHLGEL | 419 |
| WP_031488318 | 357 | --NGYAG YIDG G ASQEEFYKFIKPILEK-M--DGTEELLa--KLNREDLLRKQRTFDNGSIPHQIHLGEL | 419 |
| WP_032460140 | 357 | --NGYAG YIDG G ASQEEFYKFIKPILEK-M--DGTEELLa--KLNREDLLRKQRTFDNGSIPHQIHLGEL | 419 |
| WP_032461047 | 357 | --NGYAG YIDG G ASQEEFYKFIKPILEK-M--DGTEELLa--KLNREDLLRKQRTFDNGSIPHQIHLGEL | 419 |
| WP_032462016 | 357 | --NGYAG YIDG G ASQEEFYKFIKPILEK-M--DGTEELLv--KLNREDLLRKQRTEDNGSIPHQIHLGEL | 419 |
| WP_032462936 | 357 | --NGYAG YIDG G ASQEEFYKFIKPILEK-M--DGTEELLa--KLNREDLLRKQRTFDNGSIPHQIHLGEL | 419 |
| WP_032464890 | 357 | --NGYAG YIDG G ASQEEFYKFIKPILEK-M--DGTEELLa--KLNRKDLLRKQRTFDNGSIPHQIHLGEL | 419 |
| WP_033888930 | 182 | --NGYAG YIDG G ASQEEFYKFIKPILEK-M--DGTEELLv--KLNREDLLRKQRTEDNGSIPHQIHLGEL | 244 |
| WP_038431314 | 357 | --NGYAG YIDG G ASQEEFYKFIKPILEK-M--DGTEELLa--KLNREDLLRKQRTFDNGSIPHQIHLGEL | 419 |
| WP_038432938 | 357 | --NGYAG YIDG G ASQEEFYKFIKPILEK-M--DGTEELLa--KLNREDLLRKQRTFDNGSIPYQIHLGEL | 419 |
| WP_038434062 | 357 | --NGYAG YIDG G ASQEEFYKFIKPILEK-M--DGTEELLa--KLNREDLLRKQRTFDNGSIPHQIHLGEL | 419 |
| BAQ51233 | 268 | --NGYAG YIDG G ASQEEFYKFIKPILEK-M--DGTEELLv--KLNREDLLRKQRTEDNGSIPHQIHLGEL | 330 |
| KGE60162 | | ------- ---- - ---------------------------------------------------------- | |
| KGE60856 | | ------- ---- - ---------------------------------------------------------- | |
| WP_002989955 | 357 | --NGYAG YIDG G ASQEEFYKFIKPILEK-M--DGTEELLa--KLNREDLLRKQRTFDNGSIPHQIHLGEL | 419 |
| WP_003030002 | 357 | --KGYAG YIEN G VKQDEFYKYLKGILLQ-I--NGSGDFL--DKIDREDFLRKQRTFDNGSIPHQIHLQEM | 419 |
| WP_003065552 | 360 | --NGYAG YIEN G VKQDEFYKYLKNILSK-Ia--GSDYFL--DKIEREDFLRKQRTFDNGSIPHQIHLQEM | 422 |
| WP_001040076 | 358 | --DGYAG YIEG K INQEAFYKYLSKLLIK-Q--EGSEYFL--EKIKNEDFLRKQRTFDNGSIPHQVHLTEL | 420 |
| WP_001040078 | 358 | --DGYAG YIEG K INQEAFYKYLSKLLIK-Q--EDSENFL--EKIKNEDFLRKQRTFDNGSIPHQVHLTEL | 420 |
| WP_001040080 | 358 | --DGYAG YIEG K INQEAFYKYLSKLLIK-Q--EDSENFL--EKIKNEDFLRKQRTFDNGSIPHQVHLTEL | 420 |
| WP_001040081 | 358 | --DGYAG YIEG K INQEAFYKYLSKLLIK-Q--EDSENFL--EKIKNEDFLRKQRTFDNGSIPHQVHLTEL | 420 |
| WP_001040083 | 358 | --DGYAG YIEG K INQEAFYKYLSKLLIK-Q--EDSENFL--EKIKNEDFLRKQRTFDNGSIPHQVHLTEL | 420 |
| WP_001040085 | 358 | --DGYAG YIEG K INQEAFYKYLSKLLIK-Q--EDSENFL--EKIKNEDFLRKQRTFDNGSIPHQVHLTEL | 420 |
| WP_001040087 | 358 | --DGYAG YIEG K TNQEAFYKYLSKLLTK-Q--EDSENFL--EKIKNEDFLRKQRTFDNGSIPHQVHLTEL | 420 |
| WP_001040088 | 358 | --DGYAG YIEG K TNQEAFYKYLSKLLTK-Q--EDSENFL--EKIKNEDFLRKQRTFDNGSIPHQVHLTEL | 420 |
| WP_001040089 | 358 | --DGYAG YIEG K TNQEAFYKYLSKLLTK-Q--EDSENFL--EKIKNEDFLRKQRTFDNGSIPHQVHLTEL | 420 |
| WP_001040090 | 358 | --DGYAG YIEG K TNQEAFYKYLSKLLTK-Q--EDSENFL--EKIKNEDFLRKQRTFDNGSIPHQVHLTEL | 420 |
| WP_001040091 | 358 | --DGYAG YIEG K TNQEAFYKYLSKLLTK-Q--EDSENFL--EKIKNEDFLRKQRTFDNGSIPHQVHLTEL | 420 |
| WP_001040092 | 358 | --DGYAG YIEG K TNQEAFYKYLSKLLTK-Q--EDSEYFL--EKIKNEDFLRKQRTFDNGSIPHQVHLTEL | 420 |
| WP_001040094 | 358 | --DGYAG YIEG K TNQEAFYKYLSKLLTK-Q--EGSEYLL--EKIKNEDFLRKQRTFDNGSIPHQVHLTEL | 420 |
| WP_001040095 | 358 | --DGYAG YIEG K TNQEAFYKYLSKLLTK-Q--EGSEYLL--EKIKNEDFLRKQRTFDNGSIPHQVHLTEL | 420 |
| WP_001040096 | 358 | --DGYAG YIEG K TNQEAFYKYLSKLLTK-Q--EGSEYLL--EKIKNEDFLRKQRTFDNGSIPHQVHLTEL | 420 |
| WP_001040097 | 358 | --DGYAG YIEG K TNQEAFYKYLSKLLTK-Q--EGSEYLL--EKIKNEDFLRKQRTFDNGSIPHQVHLTEL | 420 |
| WP_001040098 | 358 | --DGYAG YIEG K TNQEAFYKYLSKLLTK-Q--EGSEYLL--EKIKNEDFLRKQRTFDNGSIPHQVHLTEL | 420 |
| WP_001040099 | 358 | --DGYAG YIEG K TNQEAFYKYLSKLLTK-Q--EGSEYLL--EKIKNEDFLRKQRTFDNGSIPHQVHLTEL | 420 |
| WP_001040100 | 358 | --DGYAG YIEG K TNQEAFYKYLSKLLTK-Q--EGSEYLL--EKIKNEDFLRKQRTFDNGSIPHQVHLTEL | 420 |
| WP_001040104 | 358 | --DGYAG YIEG K TNQEAFYKYLSKLLTK-Q--EDSENFL--EKIKNEDFLRKQRTFDNGSIPHQVHLTEL | 420 |
| WP_001040105 | 358 | --DGYAG YIEG K TNQEAFYKYLSKLLTK-Q--EDSENFL--EKIKNEDFLRKQRTFDNGSIPHQVHLTEL | 420 |
| WP_001040106 | 358 | --DGYAG YIEG K TNQGAFYKYLSKLLTK-Q--EGSEYFL--EKIKNEDFLRKQRTFDNGSIPHQVHLTEL | 420 |
| WP_001040107 | 358 | --DGYAG YIEG K TNQGAFYKYLSKLLTK-Q--EGSEYFL--EKIKNEDFLRKQRTFDNGSIPHQVHLTEL | 420 |
| WP_001040108 | 358 | --DGYAG YIEG K TNQGAFYKYLSKLLTK-Q--EGSEYFL--EKIKNEDFLRKQRTFDNGSIPHQVHLTEL | 420 |
| WP_001040109 | 358 | --DGYAG YIEG K TNQGAFYKYLSKLLTK-Q--EGSEYFL--EKIKNEDFLRKQRTFDNGSIPHQVHLTEL | 420 |
| WP_001040110 | 358 | --DGYAG YIEG K TNQGAFYKYLSKLLTK-Q--EGSEYFL--EKIKNEDFLRKQRTFDNGSIPHQVHLTEL | 420 |
| WP_015058523 | 358 | --DGYAG YIEG K TNQEAFYKYLSKLLTK-Q--EDSEYFL--EKIKNEDFLRKQRTFDNGSIPHQVHLTEL | 420 |
| WP_017643650 | 358 | --DGYAG YIEG K TNQEAFYKYLSKLLTK-Q--EGSEYLL--EKIKNEDFLRKQRTFDNGSIPHQVHLTEL | 420 |
| WP_017647151 | 358 | --DGYAG YIEG K TNQGAFYKYLSKLLTK-Q--EGSEYFL--EKIKNEDFLRKQRTFDNGSIPHQVHLTEL | 420 |
| WP_017648376 | 358 | --DGYAG YIEG K TNQGAFYKYLSKLLTK-Q--EGSEYFL--EKIKNEDFLRKQRTFDNGSIPHQVHLTEL | 420 |
| WP_017649527 | 358 | --DGYAG YIEG K TNQEAFYKYLSKLLTK-Q--EDSENFL--EKIKNEDFLRKQRTFDNGSIPHQVHLTEL | 420 |
| WP_017771611 | 358 | --DGYAG YIEG K TNQGAFYKYLSKLLTK-Q--EGSEYFL--EKIKNEDFLRKQRTFDNGSIPHQVHLTEL | 420 |
| WP_017771984 | 358 | --DGYAG YIEG K TNQEAFYKYLSKLLTK-Q--EDSENFL--EKIKNEDFLRKQRTFDNGSIPHQVHLTEL | 420 |
| CFQ25032 | 358 | --DGYAG YIEG K TNQEAFYKYLSKLLTK-Q--EDSENFL--EKIKNEDFLRKQRTFDNGSIPHQVHLTEL | 420 |
| CFV16040 | 358 | --DGYAG YIEG K TNQEAFYKYLSKLLTK-Q--EDSENFL--EKIKNEDFLRKQRTFDNGSIPHQVHLTEL | 420 |
| KLJ37842 | 358 | --DGYAG YIEG K TNQEAFYKYLSKLLTK-Q--EDSENFL--EKIKNEDFLRKQRTFDNGSIPHQVHLTEL | 420 |
| KLJ72361 | 358 | --DGYAG YIEG K TNQEAFYKYLSKLLTK-Q--EDSENFL--EKIKNEDFLRKQRTFDNGSIPHQVHLTEL | 420 |
| KLL20707 | 358 | --DGYAG YIEG K TNQEAFYKYLSKLLTK-Q--EDSENFL--EKIKNEDFLRKQRTFDNGSIPHQVHLTEL | 420 |
| KLL42645 | 358 | --DGYAG YIEG K TNQGAFYKYLSKLLTK-Q--EGSEYFL--EKIKNEDFLRKQRTFDNGSIPHQVHLTEL | 420 |
| WP_047207273 | 358 | --DGYAG YIEG K TNQEAFYKYLSKLLTK-Q--EDSENFL--EKIKNEDFLRKQRTFDNGSIPHQVHLTEL | 420 |
| WP_047209694 | 358 | --DGYAG YIEG K TNQEAFYKYLSKLLTK-Q--EGSEYLL--EKIKNEDFLRKQRTFDNGSIPHQVHLTEL | 420 |
| WP_050198062 | 358 | --DGYAG YIEG K TNQEAFYKYLSKLLTK-Q--EDSENFL--EKIKNEDFLRKQRTFDNGSIPHQVHLTEL | 420 |
| WP_050201642 | 358 | --DGYAG YIEG K TNQEAFYKYLSKLLTK-Q--EDSENFL--EKIKNEDFLRKQRTFDNGSIPHQVHLTEL | 420 |
| WP_050204027 | 358 | --DGYAG YIES K TNQGAFYKYLSKLLTK-Q--EGSEYFL--EKIKNEDFLRKQRTFDNGSIPHQVHLTEL | 420 |
| WP_050881965 | 358 | --DGYAG YIEG K TNQEAFYKYLSKLLTK-Q--EDSENFL--EKIKNEDFLRKQRTFDNGSIPHQVHLTEL | 420 |
| WP_050886065 | 358 | --DGYAG YIEG K TNQEAFYKYLSKLLTK-Q--EDSENFL--EKIKNEDFLRKQRTFDNGSIPHQVHLTEL | 420 |
| AHN30376 | 358 | --DGYAG YIEG K TNQEAFYKYLSKLLTK-Q--EDSEYFL--EKIKNEDFLRKQRTFDNGSIPHQVHLTEL | 420 |
| EAO78426 | 358 | --DGYAG YIEG K TNQEAFYKYLSKLLTK-Q--EDSENFL--EKIKNEDFLRKQRTFDNGSIPHQVHLTEL | 420 |
| CCW42055 | 358 | --DGYAG YIEG K TNQEAFYKYLSKLLTK-Q--EGSEYLL--EKIKNEDFLRKQRTFDNGSIPHQVHLTEL | 420 |
| WP_003041502 | 357 | --KGYAG YIES G VKQDEFYKYLKGILLQ-I--NGSGDFL--DKIDREDFLRKQRTFDNGSIPHQIHLQEM | 419 |
| WP_037593752 | 358 | --KGYAG YIES G VEQDEFYKYLKGILLK-I--NGSGDFL--DKIDCEDFLRKQRTFDNGSIPHQIHLQEM | 420 |
| WP_049516684 | 358 | --NGYAG YIEN G VKQDEFYKYLKNTLSK-I--DGSDYFL--DKIDREDFLRKQRTFDNGSIPHQIHLQEM | 420 |
| GAD46167 | 357 | --KGYAG YIES G VEQDEFYKYLKGILLK-I--NGSGDFL--DKIDCEDFLRKQRTFDNGSIPHQIHLQEM | 419 |
| WP_018363470 | 358 | --NGYAG YIEN G VKQDEFYKYLKGILTK-I--NGSDYFL--DKIEREDFLRKQRTFDNGSIPHQIHLQEM | 420 |
| WP_003043819 | 357 | --NGYAG YVGI G ATQEEFYKFIKPILEK-M--DGAEELLa--KLNRDDLLRKQRTFDNGSIPHQIHLKEL | 429 |
| WP_006269658 | 357 | --KGYAS YIES G VKQDEFYKYLKGILLK-I--NGSGDFL--DKIDREDFLRKQRTFDNGSIPHQIHLQEM | 419 |
| WP_048800889 | 357 | --NGYAG YIEN G VKQDEFYKYLKNTLSK-I--DGSGYFL--DKIEREDFLRKQRTFDNGSIPHQIHLQEM | 419 |
| WP_012767106 | 357 | --NGYAG YIDG G ASQEEFYKFIKPILEK-M--DGTEELLa--KLNREDLLRKQRTFDNGSIPHQIHLGEL | 419 |
| WP_014612333 | 357 | --NGYAG YIDG G ASQEEFYKFIKPILEK-M--DGTEELLa--KLNREDLLRKQRTFDNGSIPHQIHLGEL | 419 |
| WP_015017095 | 357 | --NGYAG YIDG G ASQEEFYKFIKPILEK-M--DGTEELLa--KLNREDLLRKQRTFDNGSIPHQIHLGEL | 419 |
| WP_015057649 | 357 | --NGYAG YIDG G ASQEEFYKFIKPILEK-M--DGTEELLa--KLNREDLLRKQRTFDNGSIPHQIHLGEL | 419 |
| WP_048327215 | 357 | --NGYAG YIDG G ASQEEFYKFIKPILEK-M--DGTEELLa--KLNREDLLRKQRTFDNGSIPHQIHLGEL | 419 |
| WP_049519324 | 357 | --NGYAG YIDG G ASQEEFYKFIKPILEK-M--DGTEELLa--KLNREDLLRKQRTFDNGSIPHQIHLGEL | 419 |
| WP_012515931 | 357 | --NGYAG YIEG Q VSQEEFYKYLKPILAR-L--DGSEPLL1--KIDREDFLRKQRTEDNGSIPHQIHLEEL | 419 |
| WP_021320964 | 357 | --NGYAG YIEG Q VSQEEFYKYLKPILAR-L--DGSEPLL1--KIDREDFLRKQRTEDNGSIPHQIHLEEL | 419 |
| WP_037581760 | 357 | --NGYAG YIEG Q VSQEEFYKYLKPILAR-L--DGSEPLL1--KIDREDFLRKQRTEDNGSIPHQIHLEEL | 419 |
| WP_004232481 | 357 | --NGYAG YIEN G VKQDIFYKHLKSIISE-K--NGGQYFL--DKIEREDFLRKQRTFDNGSIPYQIHLQEM | 419 |
| WP_009854540 | 358 | --NGYAG YIEN G VKQDEFYKYLKNTLSK-I--DGSDYFL--DKIEREDFLRKQRTFDNGSIPHQIHLQEM | 420 |
| WP_012962174 | 358 | --NGYAG YIEN G VKQDEFYKYLKTTLSK-I--DGSDYFL--DKIEREDFLRKQRTFDNGSIPHQIHLQEM | 420 |
| WP_039695303 | 358 | --NGYAG YIEN G VKQDEFYKYLKNILSK-IkiDGSDYFL--DKIEREDFLRKQRTFDNGSIPHQIHLQEM | 422 |
| WP_014334983 | 357 | --NGYAG YIDN G VKQDEFYKYLKTILTK-I--DDSDYFL--DKIERDDFLRKQRTFDNGSIPHQIHLQEM | 419 |
| WP_003099269 | 357 | --NGYAG YIDG K TSQEEFYKYIKPILLK-L--DGTEKLIs--KLEREDFLRKQRTFDNGSIPHQIHLNEL | 419 |
| AHY15608 | 357 | --NGYAG YIDG K TSQEEFYKYIKPILLK-L--DGTEKLIs--KLEREDFLRKQRTFDNGSIPHQIHLNEL | 419 |
| AHY17476 | 357 | --NGYAG YIDG K TSQEEFYKYIKPILLK-L--DGTEKLIs--KLEREDFLRKQRTFDNGSIPHQIHLNEL | 419 |
| ESR09100 | | ------- ---- - ---------------------------------------------------------- | |
| AGM98575 | 357 | --NGYAG YIDG K TSQEEFYKYIKPILLK-L--DGTEKLIs--KLEREDFLRKQRTFDNGSIPHQIHLNEL | 419 |
| ALF27331 | 357 | --DGYAG YIDG K TNQEAFYKYLKGLLNK-I--EGSGYFL--DKIEREDFLRKQRTFDNGSIPHQIHLQEM | 419 |
| WP_018372492 | 355 | --PSYAA YVSG A VTEDDFYKFSKGLLID-V--EGAEYFL--EKIEREDFLRKQRTFDNGAIPNQVHVKEL | 432 |
| WP_045618028 | 358 | --DGYAG YIDG K TTQEAFYKYIKNLLSK-L--EGADYFL--DKIEREDFLRKQRTFDNGSIPHQIHLQEM | 420 |
| WP_045635197 | 357 | --DGYAG YIDG K TTQETFYKYIKNLLSK-F--EGIDYFL--DKIEREDFLRKQRTFDNGSIPHQIHLQEM | 419 |
| WP_002263549 | 357 | --DGYAG YIDG K TNQEAFYKYLKGLLNK-I--EGSGYFL--DKIEREDFLRKQRTFDNGSIPHQIHLQEM | 419 |
| WP_002263887 | 357 | --DGYAG YIDG K TNQEAFYKYLKGLLNK-I--EGSGYFL--DKIEREDFLRKQRTFDNGSIPHQIHLQEM | 419 |
| WP_002264920 | 357 | --NGYAG YIEN G VKQDEFYKYLKNTLSK-I--AGSDYFL--DKIEREDFLRKQRTFDNGSIPHQIHLQEM | 419 |
| WP_002269043 | 357 | --DGYAG YIDG K TNQEAFYKYLKGLLNK-I--EGSGYFL--DKIEREDFLRKQRTFDNGSIPHQIHLQEM | 419 |
| WP_002269448 | 357 | --DGYAG YIDG K TNQEAFYKYLKGLLNK-I--EGSGYFL--DKIEREDFLRKQRTEDNGSIPHQIHLQEM | 419 |
| WP_002271977 | 357 | --DGYAG YIDG K TNQEAFYKYLKGLLNK-I--EGSGYFL--DKIEREDFLRKQRTEDNGSIPHQIHLQEM | 419 |
| WP_002272766 | 357 | --DGYAG YIDG K TNQEAFYKYLKGLLNK-I--EGSGYFL--DKIEREDFLRKQRTEDNGSIPHQIHLQEM | 419 |
| WP_002273241 | 357 | --DGYAG YIDG K TNQEAFYKYLKGLLNK-I--EGSGYFL--DKIEREDFLRKQRTEDNGSIPHQIHLQEM | 419 |
| WP_002275430 | 357 | --DGYAG YIDG K TNQEAFYKYLKGLLNK-I--EGSGYFL--DKIEREDFLRKQRTEDNGSIPHQIHLQEM | 419 |
| WP_002276448 | 357 | --DGYAG YIDG K TNQEAFYKYLKGLLNK-I--EGSGYFL--DKIEREDFLRKQRTEDNGSIPHQIHLQEM | 419 |
| WP_002277050 | 357 | --NGYAG YIEN G VKQDEFYKYLKNTLSK-I--AGSDYFL--DKIEREDFLRKQRTEDNGSIPHQIHLQEM | 419 |
| WP_002277364 | 357 | --DGYAG YIDG K TNQEAFYKYLKGLLNK-I--EGSGYFL--DKIEREDFLRKQRTEDNGSIPHQIHLQEM | 419 |
| WP_002279025 | 357 | --DGYAG YIDG K TNQEAFYKYLKGLLNK-I--EGSGYFL--DKIEREDFLRKQRTEDNGSIPHQIHLQEM | 419 |
| WP_002279859 | 357 | --DGYAG YIDG K TNQEAFYKYLKGLLNK-I--EGSGYFL--DKIEREDFLRKQRTEDNGSIPHQIHLQEM | 419 |
| WP_002280230 | 357 | --DGYAG YIDG K TNQEAFYKYLKGLLNK-I--EGSGYFL--DKIEREDFLRKQRTEDNGSIPHQIHLQEM | 419 |
| WP_002281696 | 357 | --DGYAG YIDG K TNQEAFYKYLKGLLNK-I--EGSGYFL--DKIEREDFLRKQRTEDNGSIPHQIHLQEM | 419 |
| WP_002282247 | 357 | --NGYAG YIEN G VKQDEFYKYLKNTLSK-I--TGSDYFL--DQIEREDFLRKQRTEDNGSIPHQIHLQEM | 419 |
| WP_002282906 | 357 | --DGYAG YIDG K TNQEAFYKYLKGLLNK-I--EGSGYFL--DKIEREDFLRKQRTEDNGSIPHQIHLQEM | 419 |
| WP_002283846 | 357 | --DGYAG YIDG K TNQEAFYKYLKGLLNK-I--EGSGYFL--DKIEREDFLRKQRTEDNGSIPHQIHLQEM | 419 |
| WP_002287255 | 357 | --DGYAG YIDG K TNQEAFYKYLKGLLNK-I--EGSGYFL--DKIEREDFLRKQRTEDNGSIPHQIHLQEM | 419 |
| WP_002288990 | 357 | --DGYAG YIDG K TNQEAFYKYLKGLLNK-I--EGSGYFL--DKIEREDFLRKQRTEDNGSIPHQIHLQEM | 419 |
| WP_002289641 | 357 | --DGYAG YIDG K TNQEAFYKYLKGLLNK-I--EGSGYFL--DKIEREDFLRKQRTEDNGSIPHQIHLQEM | 419 |
| WP_002290427 | 357 | --DGYAG YIDG K TNQEAFYKYLKGLLNK-I--EGSGYFL--DKIEREDFLRKQRTEDNGSIPHQIHLQEM | 419 |
| WP_002295753 | 357 | --DGYAG YIDG K TNQEAFYKYLKGLLNK-I--EGSGYFL--DKIEREDFLRKQRTEDNGSIPHQIHLQEM | 419 |
| WP_002296423 | 357 | --DGYAG YIDG K TNQEAFYKYLKGLLNK-I--EGSGYFL--DKIEREDFLRKQRTEDNGSIPHQIHLQEM | 419 |
| WP_002304487 | 357 | --NGYAG YVGA D ATEEEFYKYVKGILNK-V--EGADVWL--DKIDREDFLRKQRTEDNGSIPHQIHLQEM | 429 |
| WP_002305844 | 357 | --DGYAG YIDG K TNQEAFYKYLKGLLNK-I--EGSGYFL--DKIEREDFLRKQRTEDNGSIPHQIHLQEM | 419 |
| WP_002307203 | 357 | --DGYAG YIDG K TNQEAFYKYLKGLLNK-I--EGSGYFL--DKIEREDFLRKQRTEDNGSIPHQIHLQEM | 419 |
| WP_002310390 | 357 | --DGYAG YIDG K TNQEAFYKYLKGLLNK-I--EGSGYFL--DKIEREDFLRKQRTEDNGSIPHQIHLQEM | 419 |
| WP_002352408 | 357 | --DGYAG YIDG K TNQEAFYKYLKGLLNK-I--EGSGYFL--DKIEREDFLRKQRTEDNGSIPHQIHLQEM | 419 |
| WP_012997688 | 357 | --DGYAG YIDG K TNQEAFYKYLKGLLNK-I--EGSGYFL--DKIEREDFLRKQRTEDNGSIPHQIHLQEM | 419 |
| WP_014677909 | 357 | --DGYAG YIDG K TNQEAFYKYLKGLLNK-I--EGSGYFL--DKIEREDFLRKQRTEDNGSIPHQIHLQEM | 419 |
| WP_019312892 | 357 | --DGYAG YIDG K TNQEAFYKYLKGLLNK-I--EGSGYFL--DKIEREDFLRKQRTEDNGSIPHQIHLQEM | 419 |
| WP_019313659 | 357 | --DGYAG YIDG K TNQEAFYKYLKGLLNK-I--EGSGYFL--DKIEREDFLRKQRTEDNGSIPHQIHLQEM | 419 |
| WP_019314093 | 357 | --DGYAG YIDG K TNQEAFYKYLKGLLNK-I--EGSGYFL--DKIEREDFLRKQRTEDNGSIPHQIHLQEM | 419 |
| WP_019315370 | 357 | --DGYAG YIDG K TNQEAFYKYLKGLLNK-I--EGNGYFL--DKIEREDFLRKQRTEDNGSIPHQIHLQEM | 419 |
| WP_019803776 | 357 | --DGYAG YIDG K TNQEAFYKYLKGLLNK-I--EGSGYFL--DKIEREDFLRKQRTEDNGSIPHQIHLQEM | 419 |
| WP_019805234 | 357 | --DGYAG YIDG K TNQEAFYKYLKGLLNK-I--EGSGYFL--DKIEREDFLRKQRTEDNGSIPHQIHLQEM | 419 |
| WP_024783594 | 357 | --DGYAG YIDG K TNQEAFYKYLKGLLNK-I--EGSGYFL--DKIEREDFLRKQRTEDNGSIPHQIHLQEM | 419 |
| WP_024784288 | 357 | --NGYAG YIEN G VKQDEFYKYLKNTLSK-I--TGSDYFL--DQIEREDFLRKQRTEDNGSIPHQIHLQEM | 419 |
| WP_024784666 | 357 | --DGYAG YIDG K TNQEAFYKYLKGLLNK-I--EGSGYFL--DKIEREDFLRKQRTEDNGSIPHQIHLQEM | 419 |
| WP_024784894 | 357 | --DGYAG YIDG K TNQEAFYKYLKGLLNK-I--EGSGYFL--DKIEREDFLRKQRTEDNGSIPHQIHLQEM | 419 |
| WP_024786433 | 357 | --NGYAG YIEN G VKQDEFYKYLKNTLSK-I--AGSDYFL--DKIEREDFLRKQRTEDNGSIPHQIHLQEM | 419 |
| WP_049473442 | 357 | --DGYAG YIDG K TNQEAFYKYLKGLLNK-I--EGSGYFL--DKIEREDFLRKQRTEDNGSIPHQIHLQEM | 419 |
| WP_049474547 | 357 | --DGYAG YIDG K TNQEAFYKYLKGLLNK-I--EGSGYFL--DKIEREDFLRKQRTEDNGSIPHQIHLQEM | 419 |
| EMC03581 | 350 | --DGYAG YIDG K TNQEAFYKYLKGLLNK-I--EGSGYFL--DKIEREDFLRKQRTEDNGSIPHQIHLQEM | 412 |
| WP_000428612 | 358 | --DGYAG YIDG K TTQESFYKYIKNLLSK-F--EGADYFL--EKIEREDFLRKQRTEDNGSIPHQIHLQEM | 420 |
| WP_000428613 | 358 | --DGYAG YIDG K TTQEAFYKYIKNLLSK-F--EGTDYFL--EKIEREDFLRKQRTEDNGSIPHQIHLQEM | 420 |
| WP_049523028 | 357 | --DGYAG YIDG K TTQEGFYKYIKNLISK-I--EGAEYFL--EKIEREDFLRKQRTEDNGSIPHQIHLQEM | 419 |
| WP_003107102 | 326 | --NGYAG YING K TSQEDFYKYIKPILSK-L--KGAESLIs--KLEREDFLRKQRTFDNGSIPHQIHLNEL | 388 |
| WP_054279288 | 359 | --DGYAG YISG K TSQEAFYKYIKPILET-L--DGAEDFLt--KINREDFLRKQRTEDNGSIPHQIHLGEL | 421 |
| WP_049531101 | 358 | --EGYAG YIDS K TTQEAFYKYIKNLLSK-I--DGADYLL--DKIEREDFLRKQRTEDNGSIPHQIHLQEM | 420 |
| WP_049538452 | 358 | --DGYAG YVDG K TTQEAFYKYIKNLLSK-F--EGADYFL--EKIEREDFLRKQRTEDNGSIPHQIHLQEM | 420 |
| WP_049549711 | 358 | --DGYAG YIDG K TTQEAFYKYIKNLLSK-F--EGTDYFL--EKIEREDFLRKQRTEDNGSIPHQIHLQEM | 420 |
| WP_007896501 | 359 | --NGYAG YIEG K VSQEDFYRYIKPILSR-L--KGGDEFLa--KIDRDDFLRKQRTEDNGSIPHQIHLKEL | 421 |
| EFR44625 | 311 | --NGYAG YIEG K VSQEDFYRYIKPILSR-L--KGGDEFLa--KIDRDDFLRKQRTEDNGSIPHQIHLKEL | 373 |
| WP_002897477 | 357 | --DGYAG YIDG K TTQEAFYKYIKNLLSK-F--EGADYFL--DKIEREDFLRKQRTEDNGSIPHQIHLQEM | 419 |
| WP_002906454 | 357 | --DGYAG FIDG K TTQEAFYKYIKNLLSK-L--EGADYFL--NKIEREDFLRKQRTEDNGSIPHQIHLQEM | 419 |
| WP_009729476 | 358 | --DGYAG YIDG K TTQETFYKYIKNLLSK-F--EGADYFL--DKIEREDFLRKQRTEDNGSIPHQIHLQEM | 420 |
| CQR24647 | 358 | --NGYAG YIDG K TNQEDFYKYLKNLLQK-V--DGGDYFI--EKIEREDFLRKQRTFDNGSIPHQVHLDEM | 420 |
| WP_000066813 | 358 | --DGYAG YIDG K TTQEAFYKYIKNLLSK-F--EGADYFL--DKIEREDFLKKQRTEDNGSIPHQIHLQEM | 420 |
| WP_009754323 | 358 | --DGYAG YIDG K TTQEAFYKYIKNLLSK-F--EGADYFL--DKIEREDFLRKQRTEDNGSIPHQIHLQEM | 420 |
| WP_044674937 | 357 | --DGYAG YIEG K TTQENFYRFIKKAIEK-I--EGSDYFI--DKIDREDFLRKQRTFDNGSIPHQIHLQEM | 419 |
| WP_044676715 | 357 | --DGYAG YIEG K TTQENFYRFIKKAIEK-I--EGSNYFI--DKIDREDFLRKQRTFDNGSIPHQIHLQEM | 419 |
| WP_044680361 | 357 | --DGYAG YIEG K TTQENFYRFIKKAIEK-I--EGSNYFI--DKIDREDFLRKQRTFDNGSIPHQIHLQEM | 419 |
| WP_044681799 | 357 | --DGYAG YIEG K TTQENFYRFIKKAIEK-I--EGSDYFI--DKIDREDFLRKQRTFDNGSIPHQIHLQEM | 419 |
| WP_049533112 | 357 | --KGYAG YIEN G VKQDEFYKYLKGILLQ-I--NGSGDFL--DKIDREDFLRKQRTEDNGSIPHQIHLQEM | 419 |
| WP_029090905 | 316 | fyIDYIG YEES K SKEERLEKHIELLLAKeNvlTTVEHALleKNITFASLLPLQRSSRNAVIPYQVHEKEL | 403 |
| WP_006506696 | 361 | ksKGYYN YINR K APVDEFYKYVKKCIEK-VdtPEAKQILn--DIELENFLLKQNSRINGSVPYQMQLDEM | 429 |
| AIT42264 | 357 | --NGYAG YIDG G ASQEEFYKFIKPILEK-M--DGTEELLv--KLNREDLLRKQRTEDNGSIPHQIHLGEL | 419 |
| WP_034440723 | 363 | --NGYAG YIDG K TSQEDFYKFVKAQLKG---eENGEYFL--EAIENENFLRKQRSFYNGVIPYQIHLQEL | 425 |
| AKQ21048 | 357 | --NGYAG YIDG G ASQEEFYKFIKPILEK-M--DGTEELLv--KLNREDLLRKQRTEDNGSIPHQIHLGEL | 419 |
| WP_004636532 | 356 | --NGYAG YIDG K TNQEDFYKYIEKVMKT-IksDKKDYFL--DKIDREVFLRKQRSFYNSVIPHQIHLQEM | 420 |
| WP_002364836 | 363 | --DGYAG YIAH A VSQLKFYQYVKKIIQD-I--AGAEYFL--EKIAQENFLRKQRTFDNGVIPHQIHLAEL | 427 |
| WP_016631044 | 314 | --DGYAG YIAH A VSQLKFYQYVKKIIQD-I--AGAEYFL--EKIAQENFLRKQRTEDNGVIPHQIHLAEL | 378 |
| EMS75795 | 100 | --NGYAG YIDG K TTQEDFYKFLKKELNG-I--AGSERFM--EKVDQENFLLKQRTTANGVIPHQVHLTEL | 162 |
| WP_002373311 | 363 | --DGYAG YIAH A VSQLKFYQYVKKIIQD-I--AGAEYFL--EKIAQENFLRKQRTFDNGVIPHQIHLAEL | 427 |
| WP_002378009 | 363 | --DGYAG YITH A VSQLKFYQYVKKIIQD-I--AGAEYFL--EKIAQENFLRKQRTFDNGVIPHQIHLAEL | 427 |
| WP_002407324 | 363 | --DGYAG YITH A VSQLKFYQYVKKIIQD-I--AGAEYFL--EKIAQENFLRKQRTFDNGVIPHQIHLAEL | 427 |
| WP_002413717 | 363 | --DGYAG YIAH A VSQLKFYQYVKKIIQD-I--AGAEYFL--EKIAQENFLRKQRTFDNGVIPHQIHLAEL | 427 |
| WP_010775580 | 365 | --DGYAG YIAH A VSQLKFYQYVKKIIQD-I--AGAEYFL--EKIAQENFLRKQRTEDNGVIPHQIHLAEL | 429 |
| WP_010818269 | 363 | --DGYAG YIAH A VSQLKFYQYVKKIIQD-I--AGAEYFL--EKIAQENFLRKQRTFDNGVIPHQIHLAEL | 427 |
| WP_010824395 | 363 | --DGYAG YITH A VSQLKFYQYVKKIIQD-I--AGAEYFL--EKIAQENFLRKQRTFDNGVIPHQIHLAEL | 427 |
| WP_016622645 | 363 | --DGYAG YIAH A VSQLKFYQYVKKIIQD-I--AGAEYFL--EKIAQENFLRKQRTFDNGVIPHQIHLAEL | 427 |
| WP_033624816 | 363 | --DGYAG YIAH A VSQLKFYQYVKKIIQD-I--AGAEYFL--EKIAQENFLRKQRTFDNGVIPHQIHLAEL | 427 |
| WP_033625576 | 363 | --DGYAG YIAH A VSQLKFYQYVKKIIQD-I--AGAEYFL--EKIAQENFLRKQRTFDNGVIPHQIHLAEL | 427 |
| WP_033789179 | 363 | --DGYAG YIAH A VSQLKFYQYVKKIIQD-I--AGAEYFL--EKIAQENFLRKQRTFDNGVIPHQIHLAEL | 427 |
| WP_002310644 | 361 | --NGYAG YIEG H ATQEDFYKFVKKELTG-I--RGSEVFL--TKIEQENFLRKQRTFDNGVIPHQIHLTEL | 423 |
| WP_002312694 | 362 | --NGYAG YIEG H ATQEAFYKFVKKELTG-I--RGSEVFL--TKIEQENFLRKQRTFDNGVIPHQIHLSEL | 424 |
| WP_002314015 | 362 | --NGYAG YIEG H ATQEDFYKFVKKELTG-I--RGSEVFL--TKIEQENFLRKQRTFDNGVIPHQIHLTEL | 424 |
| WP_002320716 | 362 | --NGYAG YIEG H ATQEDFYKFVKKELTG-I--RGSEVFL--TKIEQENFLRKQRTFDNGVIPHQIHLTEL | 424 |
| WP_002330729 | 361 | --NGYAG YIEG H ATQEDFYKFVKKELTG-I--RGSEVFL--TKIEQENFLRKQRTFDNGVIPHQIHLTEL | 423 |
| WP_002335161 | 362 | --NGYAG YIEG H ATQEDFYKFVKKELTG-I--RGSEVFL--TKIEQENFLRKQRTFDNGVIPHQIHLTEL | 424 |
| WP_002345439 | 362 | --NGYAG YIEG H ATQEDFYKFVKKELTG-I--RGSEVFL--TKIEQENFLRKQRTFDNGVIPHQIHLTEL | 424 |
| WP_034867970 | 355 | --NGYAG YIKG K TIQEEFYKFVKKELSG-V--VGSEPFL--EKIDQETFLLKQRTYINGVIPHQVHLIEL | 417 |
| WP_047937432 | 362 | --NGYAG YIEG H ATQEDFYKFVKKELTG-I--RGSEVFL--TKIEQENFLRKQRTFDNGVIPHQIHLTEL | 424 |
| WP_010720994 | 355 | --NGYAG YIKG K TIQEEFYKFVKKELSG-V--VGSEPFL--EKIDQETFLLKQRTYINGVIPHQVHLIEL | 417 |
| WP_010737004 | 355 | --NGYAG YIKG K TIQEEFYKFVKKELSG-V--VGSEPFL--EKIDQETFLLKQRTYINGVIPHQVHLIEL | 417 |
| WP_034700478 | 355 | --NGYAG YIKG K TIQEEFYKFVKKELSG-V--VGSEPFL--EKIDQETFLLKQRTYINGVIPHQVHLIEL | 417 |
| WP_007209003 | 359 | --NGYAG YIDG K TKEEEFYKYLKTTLVQ---kSGYQYFI--EKIEQENFLRKQRIYDNGVIPHQVHAEEL | 421 |
| WP_023519017 | 355 | --NGYAG YVKG K ATQEDFYKFLRTELAG-L--EESQSIM--EKIDLEIYLLKQRTFANGVIPHQIHLVEM | 417 |
| WP_010770040 | 358 | --SGYAG YVEN S VTQAEFYKYIKKAIEK-V--PGAEYFL--EKIEQETFLDKQRTENNGVIPHQIHLEEL | 422 |
| WP_048604708 | 354 | --DGYAG YIDN S ISQEKFYKYITNLIEK-I--DGAEYFL--KKIENEDFLRKQRTFDNGIIPHQIHLEEL | 418 |
| WP_010750235 | 355 | --DGYAG YIDG K TTQADFYKFLKKELTG-V--PGSEPML--AKIDQENFLLKQRTPINGVIPHQVHLTEF | 417 |
| AII16583 | 396 | --NGYAG YIDG G ASQEEFYKFIKPILEK-M--DGTEELLv--KLNREDLLRKQRTEDNGSIPHQIHLGEL | 458 |
| WP_029073316 | 367 | kkNNYCN YINH K TPVDEFYKYIKKLIEK-IddPDVKTILn--KIELESFMLKQNSRINGAVPYQMQLDEL | 435 |
| WP_031589969 | 367 | kkNNYCN YINH K TPVDEFYKYIKKLIEK-IddPDVKTILn--KIELESFMLKQNSRINGAVPYQMQLDEL | 435 |
| KDA45870 | 354 | -iSGYAG YIDG K VSEEDFYKYIKKILKG-I--PETEEILq--KIDANNYLRKQRTEDNGAIPHQVHLKEL | 417 |
| WP_039099354 | 360 | ------- YVDG K -SKEDFYGDITKALKNnPdhPIVSEIKk--LIELDQFMPKQRTKDNGAIPHQLHQQEL | 425 |
| AKP02966 | 349 | --QAYDD YINK K ---KELYISLKKELKVaLp-INLAKEAe-EKISKGTYLVKPRNSENGVVPYQLNKIEM | 415 |
| WP_010991369 | 363 | --HGYAG YIDG - TKQADFYKYMKMTLEN-I--EGADYFI--AKIEKENFLRKQRTFDNGAIPHQLHLEEL | 425 |
| WP_033838504 | 363 | --HGYAG YIDG - TKQADFYKYMKMTLEN-I--EGADYFI--AKIEKENFLRKQRTFDNGAIPHQLHLEEL | 425 |
| EHN60060 | 366 | --HGYAG YIDG - TKQADFYKYMKMTLEN-I--EGADYFI--AKIEKENFLRKQRTFDNGAIPHQLHLEEL | 428 |
| EFR89594 | 132 | --HGYAG YIDG - TKQADFYKYMKTTLEN-I--EGADYFI--AKIEKENFLRKQRTFDNGAIPHQLHLEEL | 194 |
| WP_038409211 | 363 | --DGYAG YIDG - TIQEKFYKYMKKMLAN-I--DGADYFI--DQIEEENFLRKQRTFDNGTIPHQLHLEEL | 425 |
| EFR95520 | 1 | ------- ---- - ---------MKKMLAN-I--DGADYFI--DQIEEENFLRKQRTFDNGTIPHQLHLEEL | 44 |
| WP_003723650 | 363 | --DGYAG YIDG - TKQVDFYKYLKTILEN-I--EGSDYFI--AKIEEENFLRKQRTFDNGAIPHQLHLEEL | 425 |
| WP_003727705 | 363 | --DGYAG YIDG - TKQVDFYKYLKTTLEN-V--EGADYFI--TKIEEENFLRKQRTFDNGVIPHQLHLEEL | 425 |
| WP_003730785 | 363 | --DGYAG YIDG - TKQVDFYKYLKTTLEN-V--EGADYFI--TKIEEENFLRKQRTFDNGVIPHQLHLEEL | 425 |
| WP_003733029 | 363 | --HGYAG YISG - TKQADFYKYMKATLEK-I--EGADYFI--AKIEEENFLRKQRTEDNGVIPHQLHLEEL | 425 |
| WP_003739838 | 363 | --DGYAG YIDG - TKQVDFYKYLKILLEN-I--EGADYFI--AKIEEENFLRKQRTFDNGAIPHQLHLEEL | 425 |
| WP_014601172 | 363 | --DGYAG YIDG - TKQVDFYKYLKTILEN-I--EGADYFI--AKIEEENFLRKQRTFDNGAIPHQLHLEEL | 425 |
| WP_023548323 | 363 | --DGYAG YIDG - TKQVDFYKYLKTTLEN-V--EGADYFI--TKIEEENFLRKQRTFDNGVIPHQLHLEEL | 425 |
| WP_031665337 | 363 | --DGYAG YIDG - TKQVDFYKYLKTILEN-I--EGSDYFI--AKIEEENFLRKQRTFDNGAIPHQLHLEEL | 425 |
| WP_031669209 | 363 | --HGYAG YISG - TKQADFYKYMKATLEK-I--EGADYFI--AKIEEENFLRKQRTFDNGVIPHQLHLEEL | 425 |
| WP_033920898 | 363 | --DGYAG YIDG - TKQVDFYKYLKTILEN-I--EGADYFI--AKIEEENFLRKQRTFDNGAIPHQLHLEEL | 425 |
| AKI42028 | 366 | --DGYAG YIDG - TKQVDFYKYLKTILEN-I--EGADYFI--AKIEEENFLRKQRTFDNGAIPHQLHLEEL | 428 |
| AKI50529 | 366 | --DGYAG YIDG - TKQVDFYKYLKTILEN-I--EGADYFI--AKIEEENFLRKQRTFDNGAIPHQLHLEEL | 428 |
| EFR83390 | | ------- ---- - ---------------------------------------------------------- | |
| WP_046323366 | 363 | --DGYAG YIEG - TKQEAFYKYMKKMLEH-V--EGADYFI--NQIEEENFLRKQRTFDNGAIPHQLHLEEL | 425 |
| AKE81011 | 373 | --NGYAG YIDG G ASQEEFYKFIKPILEK-M--DGTEELLv--KLNREDLLRKQRTFDNGSIPHQIHLGEL | 435 |
| CUO82355 | 365 | kvKGYYN YINR K APVDEFYKFVKKCIEK-VdtPEAKQILh--DIELENFLLKQNSRINGSVPYQMQLDEM | 433 |
| WP_033162887 | 366 | klHNYLG YIKY D TPVEEFYKYIKGLLAK-VdtDEAREILe--RIDLEKFMLKQNSRTNGSIPYQMQKDEM | 434 |
| AGZ01981 | 390 | --NGYAG YIDG G ASQEEFYKFIKPILEK-M--DGTEELLv--KLNREDLLRKQRTFDNGSIPHQIHLGEL | 452 |
| AKA60242 | 357 | --NGYAG YIDG G ASQEEFYKFIKPILEK-M--DGTEELLv--KLNREDLLRKQRTFDNGSIPHQIHLGEL | 419 |
| AKS40380 | 357 | --NGYAG YIDG G ASQEEFYKFIKPILEK-M--DGTEELLv--KLNREDLLRKQRTFDNGSIPHQIHLGEL | 419 |
| 4UN5_B | 361 | --NGYAG YIDG G ASQEEFYKFIKPILEK-M--DGTEELLv--KLNREDLLRKQRTFDNGSIPHQIHLGEL | 423 |
| WP_010922251 | 420 | [chemical structure] | 486 |
| WP_039695303 | 423 | HAILRRQGDYYPFLKE--KQD RIEKILTFRIPYYVGPL VRKD--SRFAWAEY---RSDEKITPWNFDKVIDKEK | 489 |
| WP_045635197 | 420 | NAILRRQGEYYPFLKD--NKE KIEKILTFRIPYYVGPL ARGN--RDFAWLTR---NSDEAIRPWNFEEIVDKAS | 486 |
| 5AXW_A | 184 | KQLLKVQKAYHQLDQSfi--D TYIDLLETRRTYYEGPG ---Eg-SPFGWKDI---------------------- | 229 |
| WP_009880683 | 104 | HAILRRQEDFYPFLKD--NRE KIEKILTFRIPYYVGPL ARG-n-SRFAWMTR---KSEETITPWNFEEVVDKGA | 170 |
| WP_010922251 | 420 | HAILRRQEDFYPFLKD--NRE KIEKILTFRIPYYVGPL ARG-n-SRFAWMTR---KSEETITPWNFEEVVDKGA | 486 |
| WP_011054416 | 420 | HAILRRQEDFYPFLKD--NRE KIEKILTFRIPYYVGPL ARG-n-SRFAWMTR---KSEETITPWNFEEVVDKGA | 486 |
| WP_011284745 | 420 | HAILRRQEDFYPFLKD--NRE KIEKILTFRIPYYVGPL ARG-n-SRFAWMTR---KSEETITPWNFEEVVDKGA | 486 |
| WP_011285506 | 420 | HAILRRQEDFYPFLKD--NRE KIEKILTFRIPYYVGPL ARG-n-SRFAWMTR---KSEETITPWNFEEVVDKGA | 486 |
| WP_011527619 | 420 | HAILRRQEDFYPFLKD--NRE KIEKILTFRIPYYVGPL ARG-n-SRFAWMTR---KSEETITPWNFEEVVDKGA | 486 |
| WP_012560673 | 420 | HAILRRQEDFYPFLKD--NRE KIEKILTFRIPYYVGPL ARG-n-SRFAWMTR---KSEETITPWNFEEVVDKGA | 486 |
| WP_014407541 | 420 | HAILRRQEDFYPFLKD--NRE KIEKILTFRIPYYVGPL ARG-n-SRFAWMTR---KSEETITPWNFEEVVDKGA | 486 |
| WP_020905136 | 420 | HAILRRQEDFYPFLKD--NRE KIEKILTFRIPYYVGPL ARG-n-SRFAWMTR---KSEETITPWNFEEVVDKGA | 486 |
| WP_023080005 | 420 | HAILRRQEDFYPFLKD--NRE KIEKILTFRIPYYVGPL ARG-n-SRFAWMTR---KSEETITPWNFEEVVDKGA | 486 |
| WP_023610282 | 420 | HAILRRQEDFYPFLKD--NRE KIEKILTFRIPYYVGPL ARG-n-SRFAWMTR---KSEETITPWNFEEVVDKGA | 486 |
| WP_030125963 | 420 | HAILRRQEDFYPFLKD--NRE KIEKILTFRIPYYVGPL ARG-n-SRFAWMTR---KSEETITPWNFEEVVDKGA | 486 |
| WP_030126706 | 420 | HAILRRQEDFYPFLKD--NRE KIEKILTFRIPYYVGPL ARG-n-SRFAWMTR---KSEETITPWNFEEVVDKGA | 486 |
| WP_031488318 | 420 | HAILRRQEDFYPFLKD--NRE KIEKILTFRIPYYVGPL ARG-n-SRFAWMTR---KSEETITPWNFEEVVDKGA | 486 |
| WP_032460140 | 420 | HAILRRQEDFYPFLKD--NRE KIEKILTFRIPYYVGPL ARG-n-SRFAWMTR---KSEETITPWNFEEVVDKGA | 486 |
| WP_032461047 | 420 | HAILRRQEDFYPFLKD--NRE KIEKILTFRIPYYVGPL ARG-n-SRFAWMTR---KSEETITPWNFEEVVDKGA | 486 |
| WP_032462016 | 420 | HAILRRQEDFYPFLKD--NRE KIEKILTFRIPYYVGPL ARG-n-SRFAWMTR---KSEETITPWNFEEVVDKGA | 486 |
| WP_032462936 | 420 | HAILRRQEDFYPFLKD--NRE KIEKILTFRIPYYVGPL ARG-n-SRFAWMTR---KSEETITPWNFEEVVDKGA | 486 |
| WP_032464890 | 420 | HAILRRQEDFYPFLKD--NRE KIEKILTFRIPYYVGPL ARG-n-SRFAWMTR---KSEETITPWNFEEVVDKGA | 486 |
| WP_033888930 | 245 | HAILRRQEDFYPFLKD--NRE KIEKILTFRIPYYVGPL ARG-n-SRFAWMTR---KSEETITPWNFEEVVDKGA | 311 |
| WP_038431314 | 420 | HAILRRQEDFYPFLKD--NRE KIEKILTFRIPYYVGPL ARG-n-SRFAWMTR---KSEETITPWNFEEVVDKGA | 486 |
| WP_038432938 | 420 | HAILRRQEDFYPFLKD--NRE KIEKILTFRIPYYVGPL ARG-n-SRFAWMTR---KSEETITPWNFEEVVDKGA | 486 |
| WP_038434062 | 420 | HAILRRQEDFYPFLKD--NRE KIEKILTFRIPYYVGPL ARG-n-SRFAWMTR---KSEETITPWNFEEVVDKGA | 486 |
| BAQ51233 | 331 | HAILRRQEDFYPFLKD--NRE KIEKILTFRIPYYVGPL ARG-n-SRFAWMTR---KSEETITPWNFEEVVDKGA | 397 |
| KGE60162 | | --------------------- ----------------- ------------------------------------ | |
| KGE60856 | | --------------------- ----------------- ------------------------------------ | |
| WP_002989955 | 420 | HAILRRQEDFYPFLKD--NRE KIEKILTFRIPYYVGPL ARG-n-SRFAWMTR---KSEETITPWNFEEVVDKGA | 486 |
| WP_003030002 | 420 | HAILRRQEEHYPFLKE--NQD KIEKILTFRIPYYVGPL ARKG--SRFAWAEY---KADEKITPWNFDDILDKEK | 486 |
| WP_003065552 | 423 | HAILRRQGDYYPFLKE--NQD RIEKILTFRIPYYVGPL ARKD--SRFSWAEY---HSDEKITPWNFDKVIDKEK | 489 |
| WP_001040076 | 421 | RAIIRRQSEYYPFLKE--NLD RIEKILTFRIPYYVGPL AREK--SDFAWMTR---KTDDSIRPWNFEDLVDKEK | 487 |
| WP_001040078 | 421 | KAIIRRQSEYYPFLKE--NQD RIEKILTFRIPYYIGPL AREK--SDFAWMTR---KTDDSIRPWNFEDLVDKEK | 487 |
| WP_001040080 | 421 | KAIIRRQSEYYPFLKE--NQD RIEKILTFRIPYYIGPL AREK--SDFAWMTR---KTDDSIRPWNFEDLVDKEK | 487 |
| WP_001040081 | 421 | KAIIRRQSEYYPFLKE--NQD RIEKILTFRIPYYIGPL AREK--SDFAWMTR---KTDDSIRPWNFEDLVDKEK | 487 |
| WP_001040083 | 421 | KAIIRRQSEYYPFLKE--NQD RIEKILTFRIPYYIGPL AREK--SDFAWMTR---KTDDSIRPWNFEDLVDKEK | 487 |
| WP_001040085 | 421 | KAIIRRQSEYYPFLKE--NQD RIEKILTFRIPYYIGPL AREK--SDFAWMTR---KTDDSIRPWNFEDLVDKEK | 487 |
| WP_001040087 | 421 | KAIIRRQSEYYPFLKE--NQD RIEKILTFRIPYYIGPL AREK--SDFAWMTR---KTDDSIRPWNFEDLVDKEK | 487 |
| WP_001040088 | 421 | KAIIRRQSEYYPFLKE--NQD RIEKILTFRIPYYIGPL AREK--SDFAWMTR---KTDDSIRPWNFEDLVDKEK | 487 |
| WP_001040089 | 421 | KAIIRRQSEYYPFLKE--NQD RIEKILTFRIPYYIGPL AREK--SDFAWMTR---KTDDSIRPWNFEDLVDKEK | 487 |
| WP_001040090 | 421 | KAIIRRQSEYYPFLKE--NQD RIEKILTFRIPYYIGPL AREK--SDFAWMTR---KTDDSIRPWNFEDLVDKEK | 487 |
| WP_001040091 | 421 | KAIIRRQSEYYPFLKE--NQD RIEKILTFRIPYYIGPL AREK--SDFAWMTR---KTDDSIRPWNFEDLVDKEK | 487 |
| WP_001040092 | 421 | KAIIRRQSEYYPFLKE--NQD KIEKILTFRIPYYVGPL ARGN--SDFAWMTR---KTDDSIRPWNFEDLVDKEK | 487 |
| WP_001040094 | 421 | RAIIRRQSEYYPFLKE--NLD RIEKILTFRIPYYVGPL AREK--SDFAWMTR---KTDDSIRPWNFEDLVDKEK | 487 |
| WP_001040095 | 421 | RAIIRRQSEYYPFLKE--NLD RIEKILTFRIPYYVGPL AREK--SDFAWMTR---KTDDSIRPWNFEDLVDKEK | 487 |
| WP_001040096 | 421 | RAIIRRQSEYYPFLKE--NLD RIEKILTFRIPYYVGPL AREK--SDFAWMTR---KTDDSIRPWNFEDLVDKEK | 487 |
| WP_001040097 | 421 | RAIIRRQSEYYPFLKE--NLD RIEKILTFRIPYYVGPL AREK--SDFAWMTR---KTDDSIRPWNFEDLVDKEK | 487 |
| WP_001040098 | 421 | RAIIRRQSEYYPFLKE--NLD RIEKILTFRIPYYVGPL AREK--SDFAWMTR---KTDDSIRPWNFEDLVDKEK | 487 |
| WP_001040099 | 421 | RAIIRRQSEYYPFLKE--NLD RIEKILTFRIPYYVGPL AREK--SDFAWMTR---KTDDSIRPWNFEDLVDKEK | 487 |
| WP_001040100 | 421 | RAIIRRQSEYYPLLKE--NLD RIEKILTFRIPYYVGPL AREK--SDFAWMTR---KTDDSIRPWNFEDLVDKEK | 487 |
| WP_001040104 | 421 | KAIIRRQSEYYPFLKE--NQD RIEKILTFRIPYYIGPL AREK--SDFAWMTR---KTDDSIRPWNFEDLVDKEK | 487 |
| WP_001040105 | 421 | KAIIRRQSEYYPFLKE--NQD RIEKILTFRIPYYIGPL AREK--SDFAWMTR---KTDDSIRPWNFEDLVDKEK | 487 |
| WP_001040106 | 421 | KAIIRRQSEYYPFLKE--NLD RIEKILTFRIPYYVGPL AREK--SDFAWMTR---KTDDSIRPWNFEELVDKEA | 487 |
| WP_001040107 | 421 | KAIIRRQSEYYPFLKE--NLD RIEKILTFRIPYYVGPL AREK--SDFAWMTR---KTDDSIRPWNFEELVDKEA | 487 |
| WP_001040108 | 421 | KAIIRRQSEYYPFLKE--NLD RIEKILTFRIPYYVGPL AREK--SDFAWMTR---KTDDSIRPWNFEELVDKEA | 487 |
| WP_001040109 | 421 | KAIIRRQSEYYPFLKE--NLD RIEKILTFRIPYYVGPL AREK--SDFAWMTR---KTDDSIRPWNFEELVDKEA | 487 |
| WP_001040110 | 421 | KAIIRRQSEYYPFLKE--NLD RIEKILTFRIPYYVGPL AREK--SDFAWMTR---KTDDSIRPWNFEELVDKEA | 487 |
| WP_015058523 | 421 | KAIIRRQSEYYPFLKE--NQD KIEKILTFRIPYYVGPL ARGN--SDFAWMTR---KTDDSIRPWNFEDLVDKEK | 487 |
| WP_017643650 | 421 | RAIIRRQSEYYPFLKE--NLD RIEKILTFRIPYYVGPL AREK--SDFAWMTR---KTDDSIRPWNFEDLVDKEK | 487 |
| WP_017647151 | 421 | KAIIRRQSEYYPFLKE--NLD RIEKILTFRIPYYVGPL AREK--SDFAWMTR---KTDDSIRPWNFEELVDKEA | 487 |
| WP_017648376 | 421 | KAIIRRQSEYYPFLKE--NLD RIEKILTFRIPYYVGPL AREK--SDFAWMTR---KTDDSIRPWNFEELVDKEA | 487 |
| WP_017649527 | 421 | KAIIRRQSEYYPFLKE--NQD RIEKILTFRIPYYIGPL AREK--SDFAWMTR---KTDDSIRPWNFEDLVDKEK | 487 |
| WP_017771611 | 421 | KAIIRRQSEYYPFLKE--NLD RIEKILTFRIPYYVGPL AREK--SDFAWMTR---KTDDSIRPWNFEELVDKEA | 487 |
| WP_017771984 | 421 | KAIIRRQSEYYPFLKE--NQD RIEKILTFRIPYYIGPL AREK--SDFAWMTR---KTDDSIRPWNFEDLVDKEK | 487 |
| CFQ25032 | 421 | KAIIRRQSEYYPFLKE--NQD RIEKILTFRIPYYIGPL AREK--SDFAWMTR---KTDDSIRPWNFEDLVDKEK | 487 |
| CFV16040 | 421 | KAIIRRQSEYYPFLKE--NQD RIEKILTFRIPYYIGPL AREK--SDFAWMTR---KTDDSIRPWNFEDLVDKEK | 487 |
| KLJ37842 | 421 | KAIIRRQSEYYPFLKE--NQD RIEKILTFRIPYYIGPL AREK--SDFAWMTR---KTDDSIRPWNFEDLVDKEK | 487 |
| KLJ72361 | 421 | KAIIRRQSEYYPFLKE--NQD RIEKILTFRIPYYIGPL AREK--SDFAWMTR---KTDDSIRPWNFEDLVDKEK | 487 |
| KLL20707 | 421 | KAIIRRQSEYYPFLKE--NQD RIEKILTFRIPYYIGPL AREK--SDFAWMTR---KTDDSIRPWNFEDLVDKEK | 487 |
| KLL42645 | 421 | KAIIRRQSEYYPFLKE--NLD RIEKILTFRIPYYVGPL AREK--SDFAWMTR---KTDDSIRPWNFEELVDKEA | 487 |
| WP_047207273 | 421 | KAIIRRQSEYYPFLKE--NQD RIEKILTFRIPYYIGPL AREK--SDFAWMTR---KTDDSIRPWNFEDLVDKEK | 487 |
| WP_047209694 | 421 | RAIIRRQSEYYPFLKE--NLD RIEKILTFRIPYYVGPL AREK--SDFAWMTR---KTDDSIRPWNFEDLVDKEK | 487 |
| WP_050198062 | 421 | KAIIRRQSEYYPFLKE--NQD RIEKILTFRIPYYIGPL AREK--SDFAWMTR---KTDDSIRPWNFEDLVDKEK | 487 |
| WP_050201642 | 421 | KAIIRRQSEYYPFLKE--NQD RIEKILTFRIPYYIGPL AREK--SDFAWMTR---KTDDSIRPWNFEDLVDKEK | 487 |
| WP_050204027 | 421 | KAIIRRQSEYYPFLKE--NLD RIEKILTFRIPYYVGPL AREK--SDFAWMTR---KTDDSIRPWNFEELVDKEA | 487 |
| WP_050881965 | 421 | KAIIRRQSEYYPFLKE--NQD RIEKILTFRIPYYIGPL AREK--SDFAWMTR---KTDDSIRPWNFEDLVDKEK | 487 |
| WP_050886065 | 421 | KDIIRRQSEYYPFLKE--NQD RIEKILTFRIPYYIGPL AREK--SDFAWMTR---KTDDSIRPWNFEDLVDKEK | 487 |
| AHN30376 | 421 | KAIIRRQSEYYPFLKE--NQD KIEKILTFRIPYYVGPL ARGN--SDFAWMTR---KTDDSIRPWNFEDLVDKEK | 487 |
| EAO78426 | 421 | KAIIRRQSEYYPFLKE--NQD RIEKILTFRIPYYIGPL AREK--SDFAWMTR---KTDDSIRPWNFEDLVDKEK | 487 |
| CCW42055 | 421 | RAIIRRQSEYYPFLKE--NLD RIEKILTFRIPYYVGPL AREK--SDFAWMTR---KTDDSIRPWNFEELVDKEA | 487 |
| WP_003041502 | 420 | HAILRRQGEHYPFLKE--NQD KIEKILTFRIPYYVGPL ARKG--SRFAWAEY---KADEKITPWNFDDILDKEK | 486 |
| WP_037593752 | 421 | HAILRRQGEHYPFLKE--NQD KIEKILTFRIPYYVGPL ARKG--SRFAWAEY---KADEKITPWNFDDILDKEK | 487 |
| WP_049516684 | 421 | HAILRRQGEHYPFLKE--NQD KIEKILTFRIPYYVGPL ARKG--SRFAWAEY---KADEKITPWNFDDILDKEK | 487 |
| GAD46167 | 420 | HAILRRQGEHYPFLKE--NQD KIEKILTFRIPYYVGPL ARKG--SRFAWAEY---KADEKITPWNFDDILDKEK | 486 |
| WP_018363470 | 421 | HAILRRQGDYYPFLKE--NQE EIEKILTFRIPYYVGPL ARKD--SRFAWAEY---RSDEKITPWNFDKVIDKEK | 487 |
| WP_003043819 | 430 | HAILRRQEEFYPFLKE--NRE KIEKILTFRIPYYVGPL ARG-n-SRFAWLTR---KSEEAITPWNFEEVVDKGA | 496 |
| WP_006269658 | 420 | HAILRRQGEHYPFLKE--NQD KIEKILTFRIPYYVGPL ARKG--SRFAWAEY---KADEKITPWNFDDILDKEK | 486 |
| WP_048800889 | 420 | HAILRRQGEHYPFLKE--NQD KIEKILTFRIPYYVGPL VRKG--SRFAWAEY---KADEKITPWNFDDILDKEK | 486 |
| WP_012767106 | 420 | HAILRRQEDFYPFLKD--NRE KIEKILTFRIPYYVGPL ARG-n-SRFAWMTR---KSEETITPWNFEEVVDKGA | 486 |
| WP_014612333 | 420 | HAILRRQEDFYPFLKD--NRE KIEKILTFRIPYYVGPL ARG-n-SRFAWMTR---KSEETITPWNFEEVVDKGA | 486 |
| WP_015017095 | 420 | HAILRRQEDFYPFLKD--NRE KIEKILTFRIPYYVGPL ARG-n-SRFAWMTR---KSEETITPWNFEEVVDKGA | 486 |
| WP_015057649 | 420 | HAILRRQEDFYPFLKD--NRE KIEKILTFRIPYYVGPL ARG-n-SRFAWMTR---KSEETITPWNFEEVVDKGA | 486 |
| WP_048327215 | 420 | HAILRRQEDFYPFLKD--NRE KIEKILTFRIPYYVGPL ARG-n-SRFAWMTR---KSEETITPWNFEEVVDKGA | 486 |
| WP_049519324 | 420 | HAILRRQEDFYPFLKD--NRE KIEKILTFRIPYYVGPL ARG-n-SRFAWMTR---KSEETITPWNFEEVVDKGA | 486 |
| WP_012515931 | 420 | HAILRRQEVEYPFLKD--NRK KIESLLTFRIPYYVGPL ARG-h-SRFAWVKR---KFDGAIRPWNFEEIVDEEA | 486 |
| WP_021320964 | 420 | HAILRRQEVEYPFLKD--NRK KIESLLTFRIPYYVGPL ARG-h-SRFAWVKR---KFDGAIRPWNFEEIVDEEA | 486 |
| WP_037581760 | 420 | HAILRRQEVEYPFLKD--NRK KIESLLTFRIPYYVGPL ARG-h-SRFAWVKR---KFDGAIRPWNFEEIVDEEA | 486 |
| WP_004232481 | 420 | RTILRRQGEYYPFLKE--NQA KIEKILTFRIPYYVGPL ARKN--SRFAWAKY---HSDEPITPWNFDEVVDKEK | 486 |
| WP_009854540 | 421 | HAILRRQGDYYPFLKE--KQD RIEKILTFRIPYYVGPL VRKD--SRFAWAEY---RSDEKITPWNFDKVIDKEK | 487 |
| WP_012962174 | 421 | HAILRRQGEHYAFLKE--NQA KIEKILTFRIPYYVGPL ARKN--SRFAWAEY---HSDEKITPWNFDEIIDKEK | 487 |
| WP_039695303 | 423 | HAILRRQGDYYPFLKE--KQD RIEKILTFRIPYYVGPL VRKD--SRFAWAEY---RSDEKITPWNFDKVIDKEK | 489 |
| WP_014334983 | 420 | HSILRRQGDYYPFLKE--NQA KIEKILTFRIPYYVGPL ARKD--SRFAWANY---HSDEPITPWNFDEVVDKEK | 486 |
| WP_003099269 | 420 | KAIIRRQEKEYPFLKE--NQK KIEKLFTFKIPYYVGPL ANG-q-SSFAWLKR---QSNESITPWNFEEVVDQEA | 486 |
| AHY15608 | 420 | KAIIRRQEKEYPFLKE--NQK KIEKLFTFKIPYYVGPL ANG-q-SSFAWLKR---QSNESITPWNFEEVVDQEA | 486 |
| AHY17476 | 420 | KAIIRRQEKEYPFLKE--NQK KIEKLFTFKIPYYVGPL ANG-q-SSFAWLKR---QSNESITPWNFEEVVDQEA | 486 |
| ESR09100 | | --------------------- ----------------- ------------------------------------ | |
| AGM98575 | 420 | KAIIRRQEKEYPFLKE--NQK KIEKLFTFKIPYYVGPL ANG-q-SSFAWLKR---QSNESITPWNFEEVVDQEA | 486 |
| ALF27331 | 420 | RAIIRRQAEFYPFLAD--NQD RIEKILTFRIPYYIGPL ARGK--SDFSWLSR---KSADKITPWNFDEIVDKES | 486 |
| WP_018372492 | 433 | QAIILNQSKYYPFLAE--NKE KIEKILTFRIPYYVGPL ARGN--SSFAWLQR---KSDEAIRPWNFEQVVDMET | 499 |
| WP_045618028 | 421 | NAIIRRQGEHYPFLQE--NKE KIEKILTFRIPYYVGPL ARGN--RDFAWLTR---NSDQAIRPWNFEEIVDKAR | 487 |
| WP_045635197 | 420 | NAILRRQGEYYPFLKD--NKE KIEKILTFRIPYYVGPL ARGN--RDFAWLTR---NSDEAIRPWNFEEIVDKAS | 486 |
| WP_002263549 | 420 | RAIIRRQAEFYPFLAD--NQD RIEKLLTFRIPYYVGPL ARGK--SDFAWLSR---KSADKITPWNFDEIVDKES | 486 |
| WP_002263887 | 420 | RAIIRRQAEFYPFLAD--NQD RIEKLLTFRIPYYVGPL ARGK--SDFAWLSR---KSADKITPWNFDEIVDKES | 486 |
| WP_002264920 | 420 | HAILRRQGDYYPFLKE--NQD RIEKILTFRIPYYVGPL ARGK--SDFAWLSR---KSADKITPWNFDEIVDKES | 486 |
| WP_002269043 | 420 | RAIIRRQAEFYPFLAD--NQD RIEKILTFRIPYYVGPL ARGK--SDFAWLSR---KSADKITPWNFDEIVDKES | 486 |
| WP_002269448 | 420 | RAIIRRQAEFYPFLAD--NQD RIEKILTFRIPYYVGPL ARGK--SDFAWLSR---KSADKITPWNFDEIVDKES | 486 |
| WP_002271977 | 420 | RAIIRRQAEFYPFLAD--NQD RIEKILTFRIPYYVGPL ARGK--SDFAWLSR---KSADKITPWNFDEIVDKES | 486 |
| WP_002272766 | 420 | RAIIRRQAEFYPFLAD--NQD RIEKILTFRIPYYVGPL ARGK--SDFAWLSR---KSADKITPWNFDEIVDKES | 486 |
| WP_002273241 | 420 | RAIIRRQAEFYPFLAD--NQD RIEKILTFRIPYYVGPL ARGK--SDFAWLSR---KSADKITPWNFDEIVDKES | 486 |
| WP_002275430 | 420 | RAIIRRQAEFYPFLAD--NQD RIEKILTFRIPYYVGPL ARGK--SDFAWLSR---KSADKITPWNFDEIVDKES | 486 |
| WP_002276448 | 420 | RAIIRRQAEFYPFLAD--NQD RIEKILTFRIPYYVGPL ARGK--SDFAWLSR---KSADKITPWNFDEIVDKES | 486 |
| WP_002277050 | 420 | HAILRRQGDYYPFLKE--NQD RIEKILTFRIPYYVGPL ARKN--SRFAWAEY---HSDEAVMPWNFDQVIDKES | 486 |
| WP_002277364 | 420 | RAIIRRQAEFYPFLAD--NQD RIEKILTFRIPYYVGPL ARGK--SDFAWLSR---KSADKITPWNFDEIVDKES | 486 |
| WP_002279025 | 420 | RAIIRRQSEFYPFLAD--NQD RIEKILTFRIPYYVGPL ARGK--SDFAWLSR---KSADKITPWNFDEIVDKES | 486 |
| WP_002279859 | 420 | RAIIRRQAEFYPFLAD--NQD RIEKILTFRIPYYVGPL ARGK--SDFAWLSR---KSADKITPWNFDEIVDKES | 486 |
| WP_002280230 | 420 | RAIIRRQAEFYPFLAD--NQD RIEKILTFRIPYYVGPL ARGK--SDFAWLSR---KSADKITPWNFDEIVDKES | 486 |
| WP_002281696 | 420 | RAIIRRQAEFYPFLAD--NQD RIEKILTFRIPYYVGPL ARGK--SDFAWLSR---KSADKITPWNFDEIVDKES | 486 |
| WP_002282247 | 420 | HAILRRQGDYYPFLKE--NQD RIEKILTFRIPYYVGPL ARKN--SRFAWAEY---HSDEAVTPWNFDQVIDKES | 486 |
| WP_002282906 | 420 | RAIIRRQAEFYPFLAD--NQD RIEKLLTFRIPYYVGPL ARGK--SDFAWLSR---KSADKITPWNFDEIVDKES | 486 |
| WP_002283846 | 420 | RAIIRRQAEFYPFLAD--NQD RIEKILTFRIPYYVGPL ARGK--SDFAWLSR---KSADKITPWNFDEIVDKES | 486 |
| WP_002287255 | 420 | RAIIRRQAEFYPFLAD--NQD RIEKILTFRIPYYVGPL ARGK--SDFAWLSR---KSADKITPWNFDEIVDKES | 486 |
| WP_002288990 | 420 | RAIIRRQAEFYPFLAD--NQD RIEKILTFRIPYYVGPL ARGK--SDFAWLSR---KSADKITPWNFDEIVDKES | 486 |
| WP_002289641 | 420 | RAIIRRQAEFYPFLAD--NQD RIEKLLTFRIPYYVGPL ASGK--SDFAWLSR---KSADKITPWNFDEIVDKES | 486 |
| WP_002290427 | 420 | RAIIRRQAEFYPFLAD--NQD RIEKILTFRIPYYVGPL ARGK--SDFAWLSR---KSADKITPWNFDEIVDKES | 486 |
| WP_002295753 | 420 | RAIIRRQAEFYPFLAD--NQD RIEKILTFRIPYYVGPL ARGK--SDFAWLSR---KSADKITPWNFDEIVDKES | 486 |
| WP_002296423 | 420 | RAIIRRQAEFYPFLAD--NQD RIEKILTFRIPYYVGPL ARGK--SDFAWLSR---KSADKITPWNFDEIVDKES | 486 |
| WP_002304487 | 430 | HAILRRQGEHYPFLKE--NQD KIEKILTFRIPYYVGPL VRKG--SRFAWAEY---KADEKITPWNFDDILDKEK | 496 |
| WP_002305844 | 420 | RAIIRRQAEFYPFLAD--NQD RIEKILTFRIPYYVGPL ARGK--SDFAWLSR---KSADKITPWNFDEIVDKES | 486 |
| WP_002307203 | 420 | RAIIRRQAEFYPFLAD--NQD RIEKILTFRIPYYVGPL ARGK--SDFAWLSR---KSADKITPWNFDEIVDKES | 486 |
| WP_002310390 | 420 | RAIIRRQAEFYPFLAD--NQD RIEKILTFRIPYYVGPL ARGK--SDFAWLSR---KSADKITPWNFDEIVDKES | 486 |
| WP_002352408 | 420 | RAIIRRQAEFYPFLAD--NQD RIEKILTFRIPYYVGPL ARGK--SDFAWLSR---KSADKITPWNFDEIVDKES | 486 |
| WP_012997688 | 420 | RAIIRRQAEFYPFLAD--NQD RIEKILTFRIPYYVGPL ARGK--SDFAWLSR---KSADKITPWNFDEIVDKES | 486 |
| WP_014677909 | 420 | RAIIRRQAEFYPFLAD--NQD RIEKILTFRIPYYVGPL ARGK--SDFAWLSR---KSADKITPWNFDEIVDKES | 486 |
| WP_019312892 | 420 | RAIIRRQAEFYPFLAD--NQD RIEKILTFRIPYYVGPL ARGK--SDFAWLSR---KSADKITPWNFDEIVDKES | 486 |
| WP_019313659 | 420 | RAIIRRQAEFYPFLAD--NQD RIEKLLTFRIPYYVGPL ARGK--SDFAWLSR---KSADKITPWNFDEIVDKES | 486 |
| WP_019314093 | 420 | RAIIRRQAEFYPFLAD--NQD RIEKILTFRIPYYVGPL ARGK--SDFAWLSR---KSADKITPWNFDEIVDKES | 486 |
| WP_019315370 | 420 | RAIIRRQAEFYPFLAD--NQD RIEKILTFRIPYYVGPL ARGK--SDFAWLSR---KSADKITPWNFDEIVDKES | 486 |
| WP_019803776 | 420 | RAIIRRQAEFYPFLAD--NQD RIEKLLTFRIPYYVGPL ARGK--SDFAWLSR---KSADKITPWNFDEIVDKES | 486 |
| WP_019805234 | 420 | RAIIRRQAEFYPFLAD--NQD RIEKILTFRIPYYVGPL ARGK--SDFAWLSR---KSADKITPWNFDEIVDKES | 486 |
| WP_024783594 | 420 | RAIIRRQAEFYPFLAD--NQD RIEKLLTFRIPYYVGPL ARGK--SDFAWLSR---KSADKITPWNFDEIVDKES | 486 |
| WP_024784288 | 420 | HAILRRQGDYYPFLKE--NQD RIEKILTFRIPYYVGPL ARKN--SRFAWAEY---HSDEAVTPWNFDQVIDKES | 486 |
| WP_024784666 | 420 | RAIIRRQAEFYPFLAD--NQD RIEKILTFRIPYYVGPL ARGK--SDFAWLSR---KSADKITPWNFDEIVDKES | 486 |
| WP_024784894 | 420 | RAIIRRQAEFYPFLAD--NQD RIEKLLTFRIPYYVGPL ASGK--SDFAWLSR---KSADKITPWNFDEIVDKES | 486 |
| WP_024786433 | 420 | HAILRRQGDYYPFLKE--NQD RIEKILTFRIPYYVGPL ARKN--SRFAWAEY---HSDEAVTPWNFDQVIDKES | 486 |
| WP_049473442 | 420 | RAIIRRQAEFYPFLAD--NQD RIEKILTFRIPYYVGPL ARGK--SDFAWLSR---KSADKITPWNFDEIVDKES | 486 |
| WP_049474547 | 420 | RAIIRRQAEFYPFLAD--NQD RIEKLLTFRIPYYVGPL ASGK--SDFAWLSR---KSADKITPWNFDEIVDKES | 486 |
| EMC03581 | 413 | RAIIRRQAEFYPFLAD--NQD RIEKILTFRIPYYVGPL ARGK--SDFAWLSR---KSADKITPWNFDEIVDKES | 479 |
| WP_000428612 | 421 | NAILRRQGEHYPFLKE--NKE KIEKILTFRIPYYVGPL ARGN--RDFAWLTR---NSDQAIRPWNFEEIVDKAS | 487 |
| WP_000428613 | 421 | NAILRRQGEHYPFLKD--NKE KIEKILTFRIPYYVGPL ARGN--RDFAWLTR---NSDEAIRPWNFEEIVDKAS | 487 |
| WP_049523028 | 420 | NAILRHQGEYYPFLKE--NKD KIEQILTFRIPYYVGPL ARGN--SDFAWLSR---NSDEAIRPWNFEEMVDKSS | 486 |
| WP_003107102 | 389 | KSIIRRQEKYYPFLKD--KQV RIEKIFTFRIPYFVGPL ANG-n-SSFAWVKR---RSNESITPWNFEEVVEQEA | 455 |
| WP_054279288 | 422 | QAILERQQAYYPFLKD--NQE KIEKILTFRIPYYIGPL ARG-n-SRFAWLTR---TSDQKITPWNFDEMVDQEA | 488 |
| WP_049531101 | 421 | NAILRRQGEHYPFLKE--NRE KIEKILTFRIPYYVGPL ARGN--RDFAWLTR---NSDQAIRPWNFEEIVDKAS | 487 |
| WP_049538452 | 421 | NAILRRQGEHYPFLKE--NKE KIEKILTFRIPYYVGPL ARGN--RDFAWLTR---NSDQAIRPWNFEEIVDKAS | 487 |
| WP_049549711 | 421 | NAILRRQGEHYPFLKE--NKE KIEKILTFRIPYYVGPL ARGN--RDFAWLTR---NSDQAIRPWNFEEIVDKAS | 487 |
| WP_007896501 | 422 | HAILRRQEKYYPFLAE--QKE KIEQLLCFRIPYYVGPL AKGGn-SSFAWLKR---RSDEPITPWNFKDVVDEEA | 489 |
| EFR44625 | 374 | HAILRRQEKYYPFLAE--QKE KIEQLLCFRIPYYVGPL AKGGn-SSFAWLKR---RSDEPITPWNFKDVVDEEA | 441 |
| WP_002897477 | 420 | NAILRRQGEHYPFLKE--NRE KIEKILTFRIPYYVGPL ARDN--RDFSWLTR---NSDEPIRPWNFEEVVDKAR | 486 |
| WP_002906454 | 420 | NAILRRQGEHYLFLKE--NRE KIEKILAFRIPYYVGPL ARGN--RDFAWLTR---NSDQAIRPWNFEEVVDKAS | 486 |
| WP_009729476 | 421 | NAILRRQGEHYPFLKE--NKE KIEKILTFRIPYYVGPL ARGN--RDFAWLTR---NSDQAIRPWNFEEIVDKAS | 487 |
| CQR24647 | 421 | KAILRRQGEFYPFLKE--NAE KIQQILTFKIPYYVGPL ARGN--SRFAWASY---NSNEKMTPWNFDNVIDKTS | 487 |
| WP_000066813 | 421 | NAIIRRQGEHYPFLQE--NKE KIEKILTFRIPYYVGPL ARGN--GDFAWLTR---NSDQAIRPWNFEEIVDQAS | 487 |
| WP_009754323 | 421 | NAILRRQGEHYPLLKE--NKE KIEKILTFRIPYYVGPL ARGN--RDFAWLTR---NSDQAIRPWNFEEIVDKAS | 487 |
| WP_044674937 | 420 | HAIIRRQAEFYPFLVE--NQD KIEKILTFRIPYYVGPL ARGK--SEFAWLNR---KSDEKIRPWNFDEMVDKET | 486 |
| WP_044676715 | 420 | HAIIRRQAEFYPFLVE--NQD KIEKILTFRIPYYVGPL ARGK--SEFAWLNR---KSDEKIRPWNFDEMVDKET | 486 |
| WP_044680361 | 420 | HAIIRRQAEFYPFLVE--NQD KIEKILTFRIPYYVGPL ARGK--SEFAWLNR---KSDEKIRPWNFDEMVDKET | 486 |
| WP_044681799 | 420 | HAIIRRQAEFYPFLVE--NQD KIEKILTFRIPYYVGPL ARGK--SEFAWLNR---KSDEKIRPWNFDEMVDKET | 486 |
| WP_049533112 | 420 | HAILRRQEEHYPFLKE--NQD KIEKILTFRIPYYVGPL ARKG--SRFAWAEY---KADEKITPWNFDDILDKEK | 486 |
| WP_029090905 | 404 | VAILENQATYYPFLLE--QKD NIHKLLTFRIPYYVGPL ADQKd-SEFAWMVR---KQAGKITPFNFEEMVDIDA | 471 |
| WP_006506696 | 430 | IKIIDNQAEYYPILKE--KRE QLLSILTFRIPYYFGPL ETSEh----AWIKRlegKENQRILPWNYQDIVDVDA | 498 |
| AIT42264 | 420 | HAILRRQEDFYPFLKD--NRE KIEKILTFRIPYYVGPL ARG-n-SRFAWMTR---KSEETITPWNFEEVVDKGA | 486 |
| WP_034440723 | 426 | TAVLDQQEKHYSFLKE--NRD KIISLLTFRIPYYVGPL AKGE--SRFAWLER--sNSEEKIKPWNFDKIVDIDK | 493 |
| AKQ21048 | 420 | HAILRRQEDFYPFLKD--NRE KIEKILTFRIPYYVGPL ARG-n-SRFAWMTR---KSEETITPWNFEEVVDKGA | 486 |
| WP_004636532 | 421 | QAILDRQSQYYPFLAE--NRD KIESLVTFRIPYYVGPL TVSDg-SEFAWMER---QSDEPIRPWNFDEIVNKER | 488 |
| WP_002364836 | 428 | QAIIHRQAAYYPFLKE--NQE KIEQLVTFRIPYYVGPL SKGDa-STFAWLKR---QSEEPIRPWNLQETVDLDQ | 495 |
| WP_016631044 | 379 | QAIIHRQAAYYPFLKE--NQE KIEQLVTFRIPYYVGPL SKGDa-STFAWLKR---QSEEPIRPWNLQETVDLDQ | 446 |
| EMS75795 | 163 | KAIIERQKPYYPSLEE--ARD KMIRLLTFRIPYYVGPL AQGEetSSFAWLER---KTPEKVTPWNATEVIDYSA | 231 |
| WP_002373311 | 428 | QAIIHRQAAYYPFLKE--NQE KIEQLVTFRIPYYVGPL SKGDa-STFAWLKR---QSEEPIRPWNLQETVDLDQ | 495 |
| WP_002378009 | 428 | QAIIHRQAAYYPFLKE--NQE KIEQLVTFRIPYYVGPL SKGDa-NTFAWLKR---QSEEPIRPWNLQETVDLDQ | 495 |
| WP_002407324 | 428 | QAIIHRQAAYYPFLKE--NQE KIEQLVTFRIPYYVGPL SKGDa-STFAWLKR---QSEEPIRPWNLQETVDLDQ | 495 |
| WP_002413717 | 428 | QAIIHRQAAYYPFLKE--NQE KIEQLVTFRIPYYVGPL SKGDa-STFAWLKR---QSEEPIRPWNLQETVDLDQ | 495 |
| WP_010775580 | 430 | QAIIHRQAAYYPFLKE--NQK KIEQLVTFRIPYYVGPL SKGDa-STFAWLKR---QSEEPIRPWNLQETVDLDQ | 497 |
| WP_010818269 | 428 | QAIIHRQAAYYPFLKE--NQE KIEQLVTFRIPYYVGPL SKGDa-STFAWLKR---QSEEPIRPWNLQETVDLDQ | 495 |
| WP_010824395 | 428 | QAIIHRQAAYYPFLKE--NQE KIEQLVTFRIPYYVGPL SKGDa-STFAWLKR---QSEEPIRPWNLQETVDLDQ | 495 |
| WP_016622645 | 428 | QAIIHRQAAYYPFLKE--NQE KIEQLVTFRIPYYVGPL SKGDa-STFAWLKR---QSEEPIRPWNLQETVDLDQ | 495 |
| WP_033624816 | 428 | QAIIHRQAAYYPFLKE--NQK KIEQLVTFRIPYYVGPL SKGDa-STFAWLKR---QSEEPIRPWNLQETVDLDQ | 495 |
| WP_033625576 | 428 | QAIIHRQAAYYPFLKE--NQE KIEQLVTFRIPYYVGPL SKGDa-STFAWLKR---QNEKPIRPWNLQETVDLDQ | 495 |
| WP_033789179 | 428 | QAIIHRQAAYYPFLKE--NQK KIEQLVTFRIPYYVGPL SKGDa-STFAWLKR---QSEEPIRPWNLQETVDLDQ | 495 |
| WP_002310644 | 424 | RAIIANQKKHYPFLKE--EQE KLESLLTFKIPYYVGPL AKKQenSPFAWLIR---KSEEKIKPWNLPEIVDMEG | 492 |
| WP_002312694 | 425 | RAIIANQKKHYPFLKE--EQE KLESLLTFKIPYYVGPL AKKQenSPFAWLIR---KSEEKIKPWNLPEIVDMEG | 493 |
| WP_002314015 | 425 | RAIIANQKKHYPFLKE--EQE KLESLLTFKIPYYVGPL AKKQenSPFAWLIR---KSEEKIKPWNLPEIVDMEG | 493 |
| WP_002320716 | 425 | RAIIANQKKHYPFLKE--EQE KLESLLTFKIPYYVGPL AKKQenSPFAWLIR---KSEEKIKPWNLPEIVDMEG | 493 |
| WP_002330729 | 424 | RAIIANQKKHYPFLKE--EQE KLESLLTFKIPYYVGPL AKKQenSPFAWLIR---KSEEKIKPWNLPEIVDMEG | 492 |
| WP_002335161 | 425 | RAIIANQKKHYPFLKE--EQE KLESLLTFKIPYYVGPL AKKQenSPFAWLIR---KSEEKIKPWNLPEIVDMEG | 493 |
| WP_002345439 | 425 | RAIIANQKKHYPFLKE--EQE KLESLLTFKIPYYVGPL AKKQenSPFAWLIR---KSEEKIKPWNLPEIVDMEG | 493 |
| WP_034867970 | 418 | KAIIDQQKQHYPFLEE--AGP KIIALFKFRIPYYVGPL AKEQeaSSFAWIER---KTAEKINPWNFSEVVDIEK | 486 |
| WP_047937432 | 425 | RAIIANQKKHYPFLKE--EQE KLESLLTFKIPYYVGPL AKKQenSPFAWLIR---KSEEKIKPWNLPEIVDMEG | 493 |
| WP_010720994 | 418 | KAIIDQQKQHYPFLEE--AGP KIIALFKFRIPYYVGPL AKEQeaSSFAWIER---KTAEKINPWNFSEVVDIEK | 486 |
| WP_010737004 | 418 | KAIIDQQKQHYPFLEE--AGP KIIALFKFRIPYYVGPL AKEQeaSSFAWIER---KTAEKINPWNFSEVVDIEK | 486 |
| WP_034700478 | 418 | KAIIDQQKQHYPFLEE--AGP KIIALFKFRIPYYVGPL AKEQeaSSFAWIER---KTAEKINPWNFSEVVDIEK | 486 |
| WP_007209003 | 422 | RAILRKQEKYYSFLKE--NHE KIEQIFKVRIPYYVGPL AKHNegSRFAWNIR---KSDEPIRPWNMNDVVDENA | 490 |
| WP_023519017 | 418 | REIMDRQKRFYPFLKG--AQG KIEKLLTFRIPYYVGPL AQEGg-SPFAWIKR---KSPSQITPWNFAEVVDKEN | 485 |
| WP_010770040 | 423 | EAIIQKQATYYPFLAD--NKE EMKQLVTFRIPYYVGPL ADGN--SPFAWLER---ISSEPIRPGNLAEVVDIKK | 489 |
| WP_048604708 | 419 | KAILHHQAMYYPFLQE--KFS NFVDLLTFRIPYYVGPL ANGN--SRFSWLSR---KSDEPIRPWNLAEVVDLSK | 485 |
| WP_010750235 | 418 | KAIIDQQKQYYPFLEK--SKE KMIQLLTFRIPYYVGPL AQDKetSSFAWLER---KTTEKIKPWNAKDVIDYGA | 486 |
| AII16583 | 459 | HAILRRQEDFYPFLKD--NRE KIEKILTFRIPYYVGPL ARG-n-SRFAWMTR---KSEETITPWNFEEVVDKGA | 525 |
| WP_029073316 | 436 | NKILENQSVYYSDLKD--NED KIRSILTFRIPYYFGPL ITKDr--QFDWIIKkegKENERILPWNANEIVDVDK | 506 |
| WP_031589969 | 436 | NKILENQSVYYSDLKD--NED KIRSILTFRIPYYFGPL ITKDr--QFDWIIKkegKENERILPWNANEIVDVDK | 506 |
| KDA45870 | 418 | VAIVENQGKYYPFLRE--NKD KFEKILNFRIPYYVGPL ARGN--SKFAWLTR--a-GEGKITPYNFDEMIDKET | 484 |
| WP_039099354 | 426 | DRIIENQQQYYPWLAE-1NPN KLDELVAFRVPYYVGPL QQQSsdAKFAWMIR---KAEGQIIPWNFDDKVDRQA | 509 |
| AKP02966 | 416 | EKIIDNQSQYYPFLKE--NKE KLLSILSFRIPYYVGPL -QSSekNPFAWMER---KSNGHARPWNFDEIVDREK | 483 |
| WP_010991369 | 426 | EAILHQQAKYYPFLKE--NYD KIKSLVTFRIPYFVGPL ANGQ--SEFAWLTR---KADGEIRPWNIEEKVDFGK | 492 |
| WP_033838504 | 426 | EAILHQQAKYYPFLKE--NYD KIKSLVTFRIPYFVGPL ANGQ--SEFAWLTR---KADGEIRPWNIEEKVDFGK | 492 |
| EHN60060 | 429 | EAILHQQAKYYPFLKE--NYD KIKSLVTFRIPYFVGPL ANGQ--SEFAWLTR---KADGEIRPWNIEEKVDFGK | 495 |
| EFR89594 | 195 | EAILHQQAKYYPFLKE--NYD KIKSLVTFRIPYFVGPL ANGQ--SEFAWLTR---KADGEIRPWNIEEKVDFGK | 261 |
| WP_038409211 | 426 | EAILHQQAKYYPFLRK--DYE KIRSLVTFRIPYFIGPL ANGQ--SDFAWLTR---KADGEIRPWNIEEKVDFGK | 492 |
| EFR95520 | 45 | EAILHQQAKYYPFLRK--DYE KIRSLVTFRIPYFIGPL ANGQ--SDFAWLTR---KADGEIRPWNIEEKVDFGK | 111 |
| WP_003723650 | 426 | EAIIHQQAKYYPFLKE--DYD KIKSLVTFRIPYFVGPL ANGQ--SEFAWLTR---KADGEIRPWNIEEKVDFGK | 492 |
| WP_003727705 | 426 | EAILHQQAKYYPFLRE--GYD KIKSLVTFRIPYFVGPL ANGQ--SEFAWLTR---KDDGEIRPWNIEEKVDFGK | 492 |
| WP_003730785 | 426 | EAILHQQAKYYPFLRE--GYD KIKSLVTFRIPYFVGPL ANGQ--SEFAWLTR---KDDGEIRPWNIEEKVDFGK | 492 |
| WP_003733029 | 426 | EAILHQQAKYYPFLRE--DYE KIKSLVTFRIPYFVGPL AKGQ--SEFAWLTR---KADGEIRPWNIEEKVDFGK | 492 |
| WP_003739838 | 426 | EAILHQQAKYYPFLKE--AYD KIKSLVTFRIPYFVGPL ANGQ--SDFAWLTR---KADGEIRPWNIEEKVDFGK | 492 |
| WP_014601172 | 426 | EAIIHQQAKYYPFLRE--DYE KIKSLVTFRIPYFVGPL AKGQ--SEFAWLTR---KADGEIRPWNIEEKVDFGK | 492 |
| WP_023548323 | 426 | EAILHQQAKYYPFLRE--DYE KIKSLVTFRIPYFVGPL AKGQ--SEFAWLTR---KADGEIRPWNIEEKVDFGK | 492 |
| WP_031665337 | 426 | EAIIHQQAKYYTELKE--DYD KIKSLVTFRIPYFVGPL ANGQ--SEFAWLTR---KADGEIRPWNIEEKVDFGK | 492 |
| WP_031669209 | 426 | EAILHQQAKYYPFLRE--DYE KIKSLVTFRIPYFVGPL AKGQ--SEFAWLTR---KADGEIRPWNIEEKVDFGK | 492 |
| WP_033920898 | 426 | EAIIHQQAKYYPFLRE--DYE KIKSLVTFRIPYFVGPL AKGQ--SEFAWLTR---KADGEIRPWNIEEKVDFGK | 492 |
| AKI42028 | 429 | EAIIHQQAKYYPFLRE--DYE KIKSLVTFRIPYFVGPL AKGQ--SEFAWLTR---KADGEIRPWNIEEKVDFGK | 495 |
| AKI50529 | 429 | EAIIHQQAKYYPFLRE--DYE KIKSLVTFRIPYFVGPL AKGQ--SEFAWLTR---KADGEIRPWNIEEKVDFGK | 495 |
| EFR83390 | | --------------------- ----------------- ------------------------------------ | |
| WP_046323366 | 426 | EAILHQQAKYYPFLKV--DYE KIKSLVTFRIPYFVGPL ANGQ--SEFSWLTR---KADGEIRPWNIEEKVDFGK | 492 |
| AKE81011 | 436 | HAILRRQEDFYPFLKD--NRE KIEKILTFRIPYYVGPL ARG-n-SRFAWMTR---KSEETITPWNFEEVVDKGA | 502 |
| CUO82355 | 434 | IKIIDNQAKYYPVLKE--KRE QLLSILTFRIPYYFGPL ETSEh----AWIKRlegKENQRILPWNYQDTVDVDA | 502 |
| WP_033162887 | 435 | IQIIDNQSVYYPQLKE--NRD KLISILEFRIPYYFGPL AHSE----FAWIKKfedKQKERILPWNYDQIVDIDA | 503 |
| AGZ01981 | 453 | HAILRRQEDFYPFLKD--NRE KIEKILTFRIPYYVGPL ARG-n-SRFAWMTR---KSEETITPWNFEEVVDKGA | 519 |
| AKA60242 | 420 | HAILRRQEDFYPFLKD--NRE KIEKILTFRIPYYVGPL ARG-n-SRFAWMTR---KSEETITPWNFEEVVDKGA | 486 |
| AKS40380 | 420 | HAILRRQEDFYPFLKD--NRE KIEKILTFRIPYYVGPL ARG-n-SRFAWMTR---KSEETITPWNFEEVVDKGA | 486 |
| 4UN5_B | 424 | HAILRRQEDFYPFLKD--NRE KIEKILTFRIPYYVGPL ARG-n-SRFAWMTR---KSEETITPWNFEEVVDKGA | 490 |
| WP_010922251 | 487 | [chemical structure] | 561 |
| WP_039695303 | 490 | SAEKFITRMTLNDLYLPEEKVLPKHSHVYETYAVYNELTKIKYVN--EQGKES-FFDSNMKQEIFDHVEK--ENR-KVTK | 563 |
| WP_045635197 | 487 | SAEDFINKMTNYDLYLPEEKVLPKHSLLYETFAVYNELTKVKFIA--EGLRDYqFLDSGQKKQIVNQLFK--ENR-KVTE | 561 |
| 5AXW_A | 230 | --KEWYEMLMGHCTYFPEELRSVKYAYNADLYNALNDLNNLVITR--DENEKLeYYE---KFQIIENVFK--QKK-KPTL | 299 |
| WP_009880683 | 171 | SAQSFIERMTNEDKNLPNEKVLPKHSLLYEYFTVYNELTKVKYVT--EGMRKPaELSGEQKKAIVDLLFK--TNR-KVTV | 245 |
| WP_010922251 | 487 | SAQSFIERMTNEDKNLPNEKVLPKHSLLYEYFTVYNELTKVKYVT--EGMRKPaELSGEQKKAIVDLLFK--TNR-KVTV | 561 |
| WP_011054416 | 487 | SAQSFIERMTNEDKNLPNEKVLPKHSLLYEYFTVYNELTKVKYVT--EGMRKPaELSGEQKKAIVDLLFK--TNR-KVTV | 561 |
| WP_011284745 | 487 | SAQSFIERMTNEDKNLPNEKVLPKHSLLYEYFTVYNELTKVKYVT--EGMRKPaELSGEQKKAIVDLLFK--TNR-KVTV | 561 |
| WP_011285506 | 487 | SAQSFIERMTNEDKNLPNEKVLPKHSLLYEYFTVYNELTKVKYVT--EGMRKPaELSGEQKKAIVDLLFK--TNR-KVTV | 561 |
| WP_011527619 | 487 | SAQSFIERMTNEDKNLPNEKVLPKHSLLYEYFTVYNELTKVKYVT--EGMRKPaELSGEQKKAIVDLLFK--TNR-KVTV | 561 |
| WP_012560673 | 487 | SAQSFIERMTNEDKNLPNEKVLPKHSLLYEYFTVYNELTKVKYVT--EGMRKPaELSGEQKKAIVDLLFK--TNR-KVTV | 561 |
| WP_014407541 | 487 | SAQSFIERMTNEDKNLPNEKVLPKHSLLYEYFTVYNELTKVKYVT--EGMRKPaELSGEQKKAIVDLLFK--TNR-KVTV | 561 |
| WP_020905136 | 487 | SAQSFIERMTNEDKNLPNEKVLPKHSLLYEYFTVYNELTKVKYVT--EGMRKPaELSGEQKKAIVDLLFK--TNR-KVTV | 561 |
| WP_023080005 | 487 | SAQSFIERMTNEDKNLPNEKVLPKHSLLYEYFTVYNELTKVKYVT--EGMRKPaELSGEQKKAIVDLLFK--TNR-KVTV | 561 |
| WP_023610282 | 487 | SAQSFIERMTNEDKNLPNEKVLPKHSLLYEYFTVYNELTKVKYVT--EGMRKPaELSGEQKKAIVDLLFK--TNR-KVTV | 561 |
| WP_030125963 | 487 | SAQSFIERMTNEDKNLPNEKVLPKHSLLYEYFTVYNELTKVKYVT--EGMRKPaELSGEQKKAIVDLLFK--TNR-KVTV | 561 |
| WP_030126706 | 487 | SAQSFIERMTNEDKNLPNEKVLPKHSLLYEYFTVYNELTKVKYVT--EGMRKPaELSGEQKKAIVDLLFK--TNR-KVTV | 561 |
| WP_031488318 | 487 | SAQSFIERMTNEDKNLPNEKVLPKHSLLYEYFTVYNELTKVKYVT--EGMRKPeFLSGEQKKAIVDLLFK--TNR-KVTV | 561 |
| WP_032460140 | 487 | SAQSFIERMTNEDKNLPNEKVLPKHSLLYEYFTVYNELTKVKYVT--EGMRKPaELSGEQKKAIVDLLFK--TNR-KVTV | 561 |
| WP_032461047 | 487 | SAQSFIERMTNEDKNLPNEKVLPKHSLLYEYFTVYNELTKVKYVT--EGMRKPaELSGEQKKAIVDLLFK--TNR-KVTV | 561 |
| WP_032462016 | 487 | SAQSFIERMTNEDKNLPNEKVLPKHSLLYEYFTVYNELTKVKYVT--EGMRKPaELSGEQKKAIVDLLFK--TNR-KVTV | 561 |
| WP_032462936 | 487 | SAQSFIERMTNEDKNLPNEKVLPKHSLLYEYFTVYNELTKVKYVT--EGMRKPaELSGEQKKAIVDLLFK--TNR-KVTV | 561 |
| WP_032464890 | 487 | SAQSFIERMTNEDKNLPNEKVLPKHSLLYEYFTVYNELTKVKYVT--EGMRKPaELSGEQKKAIVDLLFK--TNR-KVTV | 561 |
| WP_033888930 | 312 | SAQSFIERMTNEDKNLPNEKVLPKHSLLYEYFTVYNELTKVKYVT--EGMRKPaELSGEQKKAIVDLLFK--TNR-KVTV | 386 |
| WP_038431314 | 487 | SAQSFIERMTNEDKNLPNEKVLPKHSLLYEYFTVYNELTKVKYVT--EGMRKPaELSGEQKKAIVDLLFK--TNR-KVTV | 561 |
| WP_038432938 | 487 | SAQSFIERMTNEDKNLPNEKVLPKHSLLYEYFTVYNELTKVKYVT--EGMRKPaELSGEQKKAIVDLLFK--TNR-KVTV | 561 |
| WP_038434062 | 487 | SAQSFIERMTNEDKNLPNEKVLPKHSLLYEYFTVYNELTKVKYVT--EGMRKPaELSGEQKKAIVDLLFK--TNR-KVTV | 561 |
| BAQ51233 | 398 | SAQSFIERMTNEDKNLPNEKVLPKHSLLYEYFTVYNELTKVKYVT--EGMRKPaELSGEQKKAIVDLLFK--TNR-KVTV | 472 |
| KGE60162 | | -------------------------------------------------------------------------------- | |
| KGE60856 | | -------------------------------------------------------------------------------- | |
| WP_002989955 | 487 | SAQSFIERMTNEDKNLPNEKVLPKHSLLYEYFTVYNELTKVKYVT--EGMRKPaELSGEQKKAIVDLLFK--TNR-KVTV | 561 |
| WP_003030002 | 487 | SAEKFITRMTLNDLYLPEEKVLPKHSLLYETFTVYNELTKVKYVN--EQGEAK-FFDANMKQEIFDHVEK--ENR-KVTK | 560 |
| WP_003065552 | 490 | SAEKFITRMTLNDLYLPEEKVLPKHSHVYETYAVYNELTKIKYVN--EQGKDS-FFDSNMKQEIFDHVEK--ENR-KVTK | 563 |
| WP_001040076 | 488 | SAEAFIHRMTNNDLYLPEEKVLPKHSLIYEKFTVYNELTKVRFLA--EGFKDFqFLNRKQKETIENSLEK--EKR-KVTE | 562 |
| WP_001040078 | 488 | SAEAFIHRMTNNDFYLPEEKVLPKHSLIYEKFTVYNELTKVRYKN--EQGETY-FFDSNIKQEIFDGVFK--EHR-KVSK | 561 |
| WP_001040080 | 488 | SAEAFIHRMTNNDFYLPEEKVLPKHSLIYEKFTVYNELTKVRYKN--EQGETY-FFDSNIKQEIFDGVFK--EHR-KVSK | 561 |
| WP_001040081 | 488 | SAEAFIHRMTNNDFYLPEEKVLPKHSLIYEKFTVYNELTKVRYKN--EQGETY-FFDSNIKQEIFDGVFK--EHR-KVSK | 561 |
| WP_001040083 | 488 | SAEAFIHRMTNNDFYLPEEKVLPKHSLIYEKFTVYNELTKVRYKN--EQGETY-FFDSNIKQEIFDGVFK--EHR-KVSK | 561 |
| WP_001040085 | 488 | SAEAFIHRMTNNDFYLPEEKVLPKHSLIYEKFTVYNELTKVRYKN--EQGETY-FFDSNIKQEIFDGVFK--EHR-KVSK | 561 |
| WP_001040087 | 488 | SAEAFIHRMTNNDFYLPEEKVLPKHSLIYEKFTVYNELTKVRYKN--EQGETY-FFDSNIKQEIFDGVFK--EHR-KVSK | 561 |
| WP_001040088 | 488 | SAEAFIHRMTNNDFYLPEEKVLPKHSLIYEKFTVYNELTKVRYKN--EQGETY-FFDSNIKQEIFDGVFK--EHR-KVSK | 561 |
| WP_001040089 | 488 | SAEAFIHRMTNNDFYLPEEKVLPKHSLIYEKFTVYNELTKVRYKN--EQGETY-FFDSNIKQEIFDGVFK--EHR-KVSK | 561 |
| WP_001040090 | 488 | SAEAFIHRMTNNDFYLPEEKVLPKHSLIYEKFTVYNELTKVRYKN--EQGETY-FFDSNIKQEIFDGVFK--EHR-KVSK | 561 |
| WP_001040091 | 488 | SAEAFIHRMTNNDFYLPEEKVLPKHSLIYEKFTVYNELTKVRYKN--EQGETY-FFDSNIKQEIFDGVFK--EHR-KVSK | 561 |
| WP_001040092 | 488 | SAEAFIHRMTNNDLYLPEEKVLPKHSLIYEKFTVYNELTKVRYKN--EQGETY-FFDSNVKQEIFDGVFK--EHR-KVSK | 561 |
| WP_001040094 | 488 | SAEAFIHRMTNNDLYLPEEKVLPKHSLIYEKFTVYNELTKVRFLA--EGFKDFqFLNRKQKETIENSLEK--EKR-KVTE | 562 |
| WP_001040095 | 488 | SAEAFIHRMTNNDLYLPEEKVLPKHSLIYEKFTVYNELTKVRFLA--EGFKDFqFLNRKQKETIENSLEK--EKR-KVTE | 562 |
| WP_001040096 | 488 | SAEAFIHRMTNNDLYLPEEKVLPKHSLIYEKFTVYNELTKVRFLA--EGFKDFqFLNRKQKETIENSLEK--EKR-KVTE | 562 |
| WP_001040097 | 488 | SAEAFIHRMTNNDLYLPEEKVLPKHSLIYEKFTVYNELTKVRFLA--EGFKDFqFLNRKQKETIENSLEK--EKR-KVTE | 562 |
| WP_001040098 | 488 | SAEAFIHRMTNNDLYLPEEKVLPKHSLIYEKFTVYNELTKVRFLA--EGFKDFqFLNRKQKETIENSLEK--EKR-KVTE | 562 |
| WP_001040099 | 488 | SAEAFIHRMTNNDLYLPEEKVLPKHSLIYEKFTVYNELTKVRFLA--EGFKDFqFLNRKQKETIENSLEK--EKR-KVTE | 562 |
| WP_001040100 | 488 | SAEAFIHRMTNNDLYLPEEKVLPKHSLIYEKFTVYNELTKVRFLA--EGFKDFqFLNRKQKETIENSLEK--EKR-KVTE | 562 |
| WP_001040104 | 488 | SAEAFIHRMTNNDFYLPEEKVLPKHSLIYEKFTVYNELTKVRYKN--EQGETY-FFDSNIKQEIFDGVFK--EHR-KVSK | 561 |
| WP_001040105 | 488 | SAEAFIHRMTNNDFYLPEEKVLPKHSLIYEKFTVYNELTKVRYKN--EQGETY-FFDSNIKQEIFDGVFK--EHR-KVSK | 561 |
| WP_001040106 | 488 | SAEAFIHRMTNNDLYLPEEKVLPKHSLIYEKFTVYNELTKVRYKN--EQGETY-FFDSNIKQEIFDGVFK--EHR-KVSK | 561 |
| WP_001040107 | 488 | SAEAFIHRMTNNDLYLPEEKVLPKHSLIYEKFTVYNELTKVRYKN--EQGETY-FFDSNIKQEIFDGVFK--EHR-KVSK | 561 |
| WP_001040108 | 488 | SAEAFIHRMTNNDLYLPEEKVLPKHSLIYEKFTVYNELTKVRYKN--EQGETY-FFDSNIKQEIFDGVFK--EHR-KVSK | 561 |
| WP_001040109 | 488 | SAEAFIHRMTNNDLYLPEEKVLPKHSLIYEKFTVYNELTKVRYKN--EQGETY-FFDSNIKQEIFDGVFK--EHR-KVSK | 561 |
| WP_001040110 | 488 | SAEAFIHRMTNNDLYLPEEKVLPKHSLIYEKFTVYNELTKVRYKN--EQGETY-FFDSNIKQEIFDGVFK--EHR-KVSK | 561 |
| WP_015058523 | 488 | SAEAFIHRMTNNDLYLPEEKVLPKHSLIYEKFTVYNELTKVRYKN--EQGETY-FFDSNVKQEIFDGVFK--EHR-KVSK | 561 |
| WP_017643650 | 488 | SAEAFIHRMTNNDLYLPEEKVLPKHSLIYEKFTVYNELTKVRFLA--EGFKDFqFLNRKQKETIENSLEK--EKR-KVTE | 562 |
| WP_017647151 | 488 | SAEAFIHRMTNNDLYLPEEKVLPKHSLIYEKFTVYNELTKVRYKN--EQGETY-FFDSNIKQEIFDGVFK--EHR-KVSK | 561 |
| WP_017648376 | 488 | SAEAFIHRMTNNDLYLPEEKVLPKHSLIYEKFTVYNELTKVRYKN--EQGETY-FFDSNIKQEIFDGVFK--EHR-KVSK | 561 |
| WP_017649527 | 488 | SAEAFIHRMTNNDFYLPEEKVLPKHSLIYEKFTVYNELTKVRYKN--EQGETY-FFDSNIKQEIFDGVFK--EHR-KVSK | 561 |
| WP_017771611 | 488 | SAEAFIHRMTNNDLYLPEEKVLPKHSLIYEKFTVYNELTKVRYKN--EQGETY-FFDSNIKQEIFDGVFK--EHR-KVSK | 561 |
| WP_017771984 | 488 | SAEAFIHRMTNNDFYLPEEKVLPKHSLIYEKFTVYNELTKVRYKN--EQGETY-FFDSNIKQEIFDGVFK--EHR-KVSK | 561 |
| CFQ25032 | 488 | SAEAFIHRMTNNDFYLPEEKVLPKHSLIYEKFTVYNELTKVRYKN--EQGETY-FFDSNIKQEIFDGVFK--EHR-KVSK | 561 |
| CFV16040 | 488 | SAEAFIHRMTNNDFYLPEEKVLPKHSLIYEKFTVYNELTKVRYKN--EQGETY-FFDSNIKQEIFDGVFK--EHR-KVSK | 561 |
| KLJ37842 | 488 | SAEAFIHRMTNNDFYLPEEKVLPKHSLIYEKFTVYNELTKVRYKN--EQGETY-FFDSNIKQEIFDGVFK--EHR-KVSK | 561 |
| KLJ72361 | 488 | SAEAFIHRMTNNDFYLPEEKVLPKHSLIYEKFTVYNELTKVRYKN--EQGETY-FFDSNIKQEIFDGVFK--EHR-KVSK | 561 |
| KLL20707 | 488 | SAEAFIHRMTNNDFYLPEEKVLPKHSLIYEKFTVYNELTKVRYKN--EQGETY-FFDSNIKQEIFDGVFK--EHR-KVSK | 561 |
| KLL42645 | 488 | SAEAFIHRMTNNDLYLPEEKVLPKHSLIYEKFTVYNELTKVRYKN--EQGETY-FFDSNIKQEIFDGVFK--EHR-KVSK | 561 |
| WP_047207273 | 488 | SAEAFIHRMTNNDFYLPEEKVLPKHSLIYEKFTVYNELTKVRYKN--EQGETY-FFDSNIKQEIFDGVFK--EHR-KVSK | 561 |
| WP_047209694 | 488 | SAEAFIHRMTNNDLYLPEEKVLPKHSLIYEKFTVYNELTKVRFLA--EGFKDFqFLNRKQKETIENSLEK--EKR-KVTE | 562 |
| WP_050198062 | 488 | SAEAFIHRMTNNDFYLPEEKVLPKHSLIYEKFTVYNELTKVRYKN--EQGETY-FFDSNIKQEIFDGVFK--EHR-KVSK | 561 |
| WP_050201642 | 488 | SAEAFIHRMTNNDFYLPEEKVLPKHSLIYEKFTVYNELTKVRYKN--EQGETY-FFDSNIKQEIFDGVFK--EHR-KVSK | 561 |
| WP_050204027 | 488 | SAEAFIHRMTNNDLYLPEEKVLPKHSLIYEKFTVYNELTKVRYKN--EQGETY-FFDSNIKQEIFDGVFK--EHR-KVSK | 561 |
| WP_050881965 | 488 | SAEAFIHRMTNNDFYLPEEKVLPKHSLIYEKFTVYNELTKVRYKN--EQGETY-FFDSNIKQEIFDGVFK--EHR-KVSK | 561 |
| WP_050886065 | 488 | SAEAFIHRMTNNDFYLPEEKVLPKHSLIYEKFTVYNELTKVRYKN--EQGETY-FFDSNIKQEIFDGVEK--EHR-KVSK | 561 |
| AHN30376 | 488 | SAEAFIHRMTNNDLYLPEEKVLPKHSLIYEKFTVYNELTKVRYKN--EQGETY-FFDSNVKQEIFDGVEK--EHR-KVSK | 561 |
| EAO78426 | 488 | SAEAFIHRMTNNDFYLPEEKVLPKHSLIYEKFTVYNELTKVRYKN--EQGETY-FFDSNIKQEIFDGVEK--EHR-KVSK | 561 |
| CCW42055 | 488 | SAEAFIHCMTNNDLYLPEEKVLPKHSLIYEKFTVYNELTKVRYKN--EQGETY-FFDSNIKQEIFDGVEK--EYR-KVSK | 561 |
| WP_003041502 | 487 | SAEKFITRMTLNDLYLPEEKVLPKHSLLYETFTVYNELTKVKYVN--EQGEAK-FFDANMKQEIFDHVEK--ENR-KVTK | 560 |
| WP_037593752 | 488 | SAEKFITRMTLNDLYLPEEKVLPKHSPLYETFTVYNELTKVKYVN--EQGEAK-FFDTNMKQEIFDHVEK--ENR-KVTK | 561 |
| WP_049516684 | 488 | SAEKFITRMTLNDLYLPEEKVLPKHSPLYETFTVYNELTKVKYVN--EQGEAK-FFDTNMKQEIFDHVEK--ENR-KVTK | 561 |
| GAD46167 | 487 | SAEKFITRMTLNDLYLPEEKVLPKHSPLYETFTVYNELTKVKYVN--EQGEAK-FFDTNMKQEIFDHVEK--ENR-KVTK | 560 |
| WP_018363470 | 488 | SAEKFITRMTLNDLYLPEEKVLPKHSHVYETFAVYNELTKVKYVN--EQGKDS-FFDSNMKQEIFDHVEK--ENR-KVTK | 561 |
| WP_003043819 | 497 | SAQSFIERMTNEDEQLPNKKVLPKHSLLYEYFTVYNELTKVKYVT--ERMRKPeFLSGEQKKAIVDLLFK--TNR-KVTV | 571 |
| WP_006269658 | 487 | SAEKFITRMTLNDLYLPEEKVLPKHSPLYEAFTVYNELTKVKYVN--EQGEAK-FFDTNMKQEIFDHVEK--ENR-KVTK | 560 |
| WP_048800889 | 487 | SAEKFITRMTLNDLYLPEEKVLPKHSLLYEIFTVYNELTKVKYVN--EQGEAK-FFDANMKQEIFDHVEK--ENP-KVTK | 560 |
| WP_012767106 | 487 | SAQSFIERMTNEDKNLPNEKVLPKHSLLYEYFTVYNELTKVKYVT--EGMRKPeFLSGKQKEAIVDLLFK--TNR-KVTV | 561 |
| WP_014612333 | 487 | SAQSFIERMTNEDKNLPNEKVLPKHSLLYEYFTVYNELTKVKYVT--EGMRKPeFLSGKQKEAIVDLLFK--TNR-KVTV | 561 |
| WP_015017095 | 487 | SAQSFIERMTNEDKNLPNEKVLPKHSLLYEYFTVYNELTKVKYVT--EGMRKPeFLSGKQKEAIVDLLFK--TNR-KVTV | 561 |
| WP_015057649 | 487 | SAQSFIERMTNEDKNLPNEKVLPKHSLLYEYFTVYNELTKVKYVT--EGMRKPeFLSGKQKEAIVDLLFK--TNR-KVTV | 561 |
| WP_048327215 | 487 | SAQSFIERMTNEDKNLPNEKVLPKHSLLYEYFTVYNELTKVKYVT--EGMRKPeFLSGKQKEAIVDLLFK--TNR-KVTV | 561 |
| WP_049519324 | 487 | SAQSFIERMTNEDKNLPNEKVLPKHSLLYEYFTVYNELTKVKYVT--EGMRKPaELSGEQKKAIVDLLFK--TNR-KVTV | 561 |
| WP_012515931 | 487 | SAQIFIEKMTKNDLYLPNEKVLPKHSLLYETFTVYNELTKVKYAT--EGMTRPqFLSADQKQAIVDLLFK--TNR-KVTV | 561 |
| WP_021320964 | 487 | SAQIFIEKMTKNDLYLPNEKVLPKHSLLYETFTVYNELTKVKYAT--EGMTRPqFLSADQKQAIVDLLFK--TNR-KVTV | 561 |
| WP_037581760 | 487 | SAQIFIEKMTKNDLYLPNEKVLPKHSLLYETFTVYNELTKVKYAT--EGMTRPqFLSADQKQAIVDLLFK--TNR-KVTV | 561 |
| WP_004232481 | 487 | SAEKFITRMTLNDLYLPEEKVLPKHSYVYETFAVYNELTKIKYVN--EQGKSF-FFDANMKQEIFDHVEK--ENR-KVTK | 560 |
| WP_009854540 | 488 | SAEKFITRMTLNDLYLPEEKVLPKHSHVYETYAVYNELTKIKYVN--EQGKES-FFDSNMKQEIFDHVEK--ENR-KVTK | 561 |
| WP_012962174 | 488 | SAEKFITRMTLNDLYLPEEKVLPKHSLVYETYTVYNELTKVKYVN--EQGKSN-FFDANMKQEIFEHVEK--ENR-KVTK | 561 |
| WP_039695303 | 490 | SAEKFITRMTLNDLYLPEEKVLPKHSHVYETYAVYNELTKIKYVN--EQGKES-FFDSNMKQEIFDHVEK--ENR-KVTK | 563 |
| WP_014334983 | 487 | SAEKFITRMTLNDLYLPEEKVLPKHSHVYETFTVYNELTKIKYVN--EQGESF-FFDANMKQEIFDHVEK--ENR-KVTK | 560 |
| WP_003099269 | 487 | SARAFIERMTNEDTYLPEEKVLPKHSPLYEMFMVYNELTKVKYQT--EGMKRPvFLSSEDKEEIVNLLFK--KER-KVTV | 561 |
| AHY15608 | 487 | SARAFIERMTNEDTYLPEEKVLPKHSPLYEMFMVYNELTKVKYQT--EGMKRPvFLSSEDKEEIVNLLFK--KER-KVTV | 561 |
| AHY17476 | 487 | SARAFIERMTNEDTYLPEEKVLPKHSPLYEMFMVYNELTKVKYQT--EGMKRPvFLSSEDKEEIVNLLFK--KER-KVTV | 561 |
| ESR09100 | | -------------------------------------------------------------------------------- | |
| AGM98575 | 487 | SARAFIERMTNEDTYLPEEKVLPKHSPLYEMFMVYNELTKVKYQT--EGMKRPvFLSSEDKEEIVNLLFK--KER-KVTV | 561 |
| ALF27331 | 487 | SAEAFINRMTNYDLYLPNQKVLPRHSLLYEKFTVYNELTKVKYKT--EQGKTA-FFDANMKQEIEDGVEK--VYR-KVTK | 560 |
| WP_018372492 | 500 | SASRFIERMTLHDLYLPDEKVLPRHSLIYEKYTVFNELTKVRETP--EGGKEV-YESKTDKENIFDSLEK--RYR-KVTK | 573 |
| WP_045618028 | 488 | SAEDFINKMTNYDLYLPEEKVLPKHSLLYETFAVYNELTKVKFIA--EGLRDYqFLDSGQKQQIVTQLFK--EKR-KVTE | 562 |
| WP_045635197 | 487 | SAEDFINKMTNYDLYLPEEKVLPKHSLLYETFAVYNELTKVKFIA--EGLRDYqFLDSGQKKQIVNQLFK--ENR-KVTE | 561 |
| WP_002263549 | 487 | SAEAFINRMTNYDLYLPNQKVLPKHSLLYEKFTVYNELTKVKYKT--EQGKTA-FFDANMKQEIEDGVEK--VYR-KVTK | 560 |
| WP_002263887 | 487 | SAEAFINRMTNYDLYLPNQKVLPKHSLLYEKFTVYNELIKVKYKT--EQGKTA-FFDANMKQEIEDGVEK--VYR-KVTK | 560 |
| WP_002264920 | 487 | SVEAFINRMTNYDLYLPNQKVLPKHSLLYEKFTVYNELTKVKYKT--EQGKTA-FFDANMKQEIEDGVEK--VYR-KVTK | 560 |
| WP_002269043 | 487 | SVEAFINRMTNYDLYLPNQKVLPKHSLLYEKFTVYNELTKVKYKT--EQGKTA-FFDANMKQEIEDGVEK--VYR-KVTK | 560 |
| WP_002269448 | 487 | SAEAFINRMTNYDLYLPNQKVLPKHSLLYEKFTVYNELTKVKYKT--EQGKTA-FFDANMKQEIFDGVFK--VYR-KVTK | 560 |
| WP_002271977 | 487 | SAEAFINRMTNYDLYLPNQKVLPKHSLLYEKFTVYNELTKVKYKT--EQGKTA-FFDANMKQEIFDGVFK--VYR-KVTK | 560 |
| WP_002272766 | 487 | SAEAFINRMTNYDLYLPNQKVLPKHSLLYEKFTVYNELTKVKYKT--EQGKTA-FFDANMKQEIFDGVFK--VYR-KVTK | 560 |
| WP_002273241 | 487 | SAEAFINRMTNYDLYLPNQKVLPKHSLLYEKFTVYNELTKVKYKT--EQGKTA-FFDANMKQEIFDGVFK--VYR-KVTK | 560 |
| WP_002275430 | 487 | SAEAFINRMTNYDLYLPNQKVLPKHSLLYEKFTVYNELTKVKYKT--EQGKTA-FFDANMKQEIFDGVFK--VYR-KVTK | 560 |
| WP_002276448 | 487 | SAEAFINRMTNYDLYLPNQKVLPKHSLLYEKFTVYNELTKVKYKT--EQGKTA-FFDANMKQEIFDGVFK--VYR-KVTK | 560 |
| WP_002277050 | 487 | SAQAFIEHMTNNDLYLPNEKVLPKHSPLYEKYTVYNELTKIKYVT--EIGEAK-FFDANLKQEIFDGLFK--HER-KVTK | 560 |
| WP_002277364 | 487 | SAEAFINRMTNYDLYLPNQKVLPKHSLLYEKFTVYNELTKVKYKT--EQGKTA-FFDANMKQEIFDGVFK--VYR-KVTK | 560 |
| WP_002279025 | 487 | SAEAFINRMTNYDLYLPNQKVLPKHSLLYEKFTVYNELTKVKYKT--EQGETA-FFDANMKQEIFDGVFK--VYR-KVTK | 560 |
| WP_002279859 | 487 | SVEAFINRMTNYDLYLPNQKVLPKHSLLYEKFTVYNELTKVKYKT--EQGKTA-FFDANMKQEIFDGVFK--VYR-KVTK | 560 |
| WP_002280230 | 487 | SAEAFINRMTNYDLYLPNQKVLPKHSLLYEKFTVYNELTKVKYKT--EQGKTA-FFDANMKQEIFDGVFK--VYR-KVTK | 560 |
| WP_002281696 | 487 | SAEAFINRMTNYDLYLPNQKVLPKHSLLYEKFTVYNELTKVKYKT--EQGKTA-FFDANMKQEIFDGVFK--VYR-KVTK | 560 |
| WP_002282247 | 487 | SAQAFIEHMTNNDLYLPNEKVLPKHSPLYEKYTVYNELTKIKYVT--EIGEAK-FFDANLKQEIFDGLFK--HER-KVTK | 560 |
| WP_002282906 | 487 | SAEAFINRMTNYDLYLPNQKVLPKHSLLYEKFTVYNELTKVKYKT--EQGKTA-FFDANMKQEIFDGVFK--VYR-KVTK | 560 |
| WP_002283846 | 487 | SVEAFINRMTNYDLYLPNQKVLPKHSLLYEKFTVYNELTKVKYKT--EQGKTA-FFDANMKQEIFDGVFK--VYR-KVTK | 560 |
| WP_002287255 | 487 | SAEAFINRMTNYDLYLPNQKVLPKHSLLYEKFTVYNELTKVKYKT--EQGKTA-FFDANMKQEIFDGVFK--VYR-KVTK | 560 |
| WP_002288990 | 487 | SVEAFINRMTNYDLYLPNQKVLPKHSLLYEKFTVYNELTKVKYKT--EQGKTA-FFDANMKQEIFDGVFK--VYR-KVTK | 560 |
| WP_002289641 | 487 | SAEAFINRMTNYDLYLPNQKVLPKHSLLYEKFTVYNELTKVKYKT--EQGKTA-FFDANMKQEIFDGVFK--VYR-KVTK | 560 |
| WP_002290427 | 487 | SAEAFINRMTNYDLYLPNQKVLPKHSLLYEKFTVYNELTKVKYKT--EQGKTA-FFDANMKQEIFDGVFK--VYR-KVTK | 560 |
| WP_002295753 | 487 | SAEAFINRMTNYDLYLPNQKVLPKHSLLYEKFTVYNELTKVKYKT--EQGKTA-FFDANMKQEIFDGVFK--VYR-KVTK | 560 |
| WP_002296423 | 487 | SVEAFINRMTNYDLYLPNQKVLPKHSLLYEKFTVYNELTKVKYKT--EQGKTA-FFDANMKQEIFDGVFK--VYR-KVTK | 560 |
| WP_002304487 | 497 | SAEKFITRMTLNDLYLPEEKVLPKHSLLYETFTVYNELTKVKYVN--EQGEAK-FFDANMKQEIFDHVFK--ENR-KVTK | 570 |
| WP_002305844 | 487 | SAEAFINRMTNYDLYLPNQKVLPKHSLLYEKFTVYNELTKVKYKT--EQGKTA-FFDANMKQEIFDGVFK--VYR-KVTK | 560 |
| WP_002307203 | 487 | SVEAFINRMTNYDLYLPNQKVLPKHSLLYEKFTVYNELTKVKYKT--EQGKTA-FFDANMKQEIFDGVFK--VYR-KVTK | 560 |
| WP_002310390 | 487 | SAEAFINRMTNYDLYLPNQKVLPKHSLLYEKFTVYNELTKVKYKT--EQGKTA-FFDANMKQEIFDGVFK--VYR-KVTK | 560 |
| WP_002352408 | 487 | SAEAFINRMTNYDLYLPNQKVLPKHSLLYEKFTVYNELTKVKYKT--EQGKTA-FFDANMKQEIFDGVFK--VYR-KVTK | 560 |
| WP_012997688 | 487 | SAEAFINRMTNYDLYLPNQKVLPKHSLLYEKFTVYNELTKVKYKT--EQGKTA-FFDANMKQEIFDGVFK--VYR-KVTK | 560 |
| WP_014677909 | 487 | SVEAFINRMTNYDLYLPNQKVLPKHSLLYEKFTVYNELTKVKYKT--EQGKTA-FFDANMKQEIFDGVFK--VYR-KVTK | 560 |
| WP_019312892 | 487 | SAEAFINRMTNYDLYLPNQKVLPKHSLLYEKFTVYNELTKVKYKT--EQGKTA-FFDANMKQEIFDGVFK--VYR-KVTK | 560 |
| WP_019313659 | 487 | SAEAFINRMTNYDLYLPNQKVLPKHSLLYEKFTVYNELTKVKYKT--EQGKTA-FFDANMKQEIFDGVFK--VYR-KVTK | 560 |
| WP_019314093 | 487 | SVEAFINRMTNYDLYLPNQKVLPKHSLLYEKFTVYNELTKVKYKT--EQGKTA-FFDANMKQEIFDGVFK--VYR-KVTK | 560 |
| WP_019315370 | 487 | SAEAFINRMTNYDLYLPNQKVLPKHSLLYEKFTVYNELTKVKYKT--EQGKTA-FFDANMKQEIFDGVFK--VYR-KVTK | 560 |
| WP_019803776 | 487 | SAEAFINRMTNYDLYLPNQKVLPKHSLLYEKFTVYNELTKVKYKT--EQGKTA-FFDANMKQEIFDGVFK--VYR-KVTK | 560 |
| WP_019805234 | 487 | SAEAFINRMTNYDLYLPNQKVLPKHSLLYEKFTVYNELTKVKYKT--EQGKTA-FFDANMKQEIFDGVFK--VYR-KVTK | 560 |
| WP_024783594 | 487 | SAEAFINRMTNYDLYLPNQKVLPKHSLLYEKFTVYNELTKVKYKT--EQGKTA-FFDANMKQEIFDGVFK--VYR-KVTK | 560 |
| WP_024784288 | 487 | SAQAFIEHMTNNDLYLPNEKVLPKHSPLYEKYTVYNELTKIKYVT--EIGEAK-FFDANLKQEIFDGLFK--HER-KVTK | 560 |
| WP_024784666 | 487 | SAEAFINRMTNYDLYLPNQKVLPKHSLLYEKFTVYNELTKVKYKT--EQGKTA-FFDANMKQEIFDGVFK--VYR-KVTK | 560 |
| WP_024784894 | 487 | SAEAFINRMTNYDLYLPNQKVLPKHSLLYEKFTVYNELTKVKYKT--EQGKTA-FFDANMKQEIFDGVFK--VYR-KVTK | 560 |
| WP_024786433 | 487 | SAQAFIEHMTNNDLYLPNEKVLPKHSPLYEKYTVYNELTKIKYVT--EIGEAK-FFDANLKQEIFDGLFK--HER-KVTK | 560 |
| WP_049473442 | 487 | SAEAFINRMTNYDLYLPNQKVLPKHSLLYEKFTVYNELTKVKYKT--EQGKTA-FFDANMKQEIFDGVFK--VYR-KVTK | 560 |
| WP_049474547 | 487 | SAEAFINRMTNYDLYLPNQKVLPKHSLLYEKFTVYNELTKVKYKT--EQGKTA-FFDANMKQEIFDGVFK--VYR-KVTK | 560 |
| EMC03581 | 480 | SAEAFINRMTNYDLYLPNQKVLPKHSLLYEKFTVYNELTKVKYKT--EQGKTA-FFDANMKQEIFDGVFK--VYR-KVTK | 553 |
| WP_000428612 | 488 | SAESFINKMTNYDLYLPEEKVLPKHSLLYETFAVYNELTKVKFIA--EGLRDYqFLDSRQKKDIFYTLFKaeDKR-KVTE | 564 |
| WP_000428613 | 488 | SAEDFINKMTNYDLYLPEEKVLPKHSLLYETFAVYNELTKVKFIA--EGLRDYqFLDSGQKKQIVTQLFK--EKR-KVTE | 562 |
| WP_049523028 | 487 | SAEDFIHRMTNYDLYLPEEKVLPKHSLLYETFTVYNELTKVKYIA--EGMKDYqFLDSGQKKQIVNQLFK--EKR-KVTE | 561 |
| WP_003107102 | 456 | SAKVFIERMTNFDTYLPEEKVLPKHSLLYEMFTVYNELTKVKYQA--EGMRKPeFLSSEEKIEIVSNLFK--TER-KVTV | 530 |
| WP_054279288 | 489 | SAQAFIERMTNFDEYLPQEKVLPKHSLTYEYFTVYNELTKVKYVT--EGMTKPeFLSAGQKEQIVELLFK--KYR-KVTV | 563 |
| WP_049531101 | 488 | SAEAFINKMTNYDLYLPEEKVLPKHSLLYETFAVYNELTKVKFIA--EGLRDYqFLDSGQKKKIINQLFK--EKR-KVTE | 562 |
| WP_049538452 | 488 | SAEDFINKMTNYDLYLPEEKVLPKHSLLYETFAVYNELTKVKFIA--EGLRDYqFLDSGQKKQIVNQLFK--EKR-KVTE | 562 |
| WP_049549711 | 488 | SAEDFINKMTNYDLYLPEEKVLPKHSLLYETFAVYNELTKVKFIA--EGLRDYqFLDSGQKKQIVNQLFK--EKR-KVTE | 562 |
| WP_007896501 | 490 | SAQAFIEGMTNYDTYLPEEKVLPKHSPLYEMFTVYNELTKVKYIA--ENMTKPlYLSAEQKEATIDHLFK--QTR-KVTV | 564 |
| EFR44625 | 442 | SAQAFIEGMTNYDTYLPEEKVLPKHSPLYEMFTVYNELTKVKYIA--ENMTKPlYLSAEQKEATIDHLFK--QTR-KVTV | 516 |
| WP_002897477 | 487 | SAEDFIHRMTNYDLYLPEEKVLPKHSLLYETFAVYNELTKVKFIA--EGLRDYqFLDSGQKKQIVNQLFK--EKR-KVTE | 561 |
| WP_002906454 | 487 | SAEDFINKMTNYDLYLPEEKVLPKHSLLYETFAVYNELTKVKFIA--EGLRDYqFLDSGQKKQIVNQLFK--DKR-KVTE | 561 |
| WP_009729476 | 488 | SAEDFINKMTNYDLYLPEEKVLPKHSLLYETFAVYNELTKVKFIA--EGLRDYqFLDSGQKKQIVTQLFK--EKR-KVTE | 562 |
| CQR24647 | 488 | SAQAFIERMTNNDLYLPDQKVLPKHSLLYQKFAVYNELTKIKYVT--ETGEAR-LFDVFLKKEIFDGLFK--KER-KVTK | 561 |
| WP_000066813 | 488 | SAEDFINKMTNYDLYLPEEKVLPKHSLLYETFAVYNELTKVKFIA--EGLTRYqFLDKKQKKDIFDTFFKaeNKR-KVTE | 564 |
| WP_009754323 | 488 | SAESFINKMTNYDLYLPEEKVLPKHSLLYETFAVYNELTKVKFIA--EGLRDYqFFDSGQKKQIVNQLFK--EKR-KVTE | 562 |
| WP_044674937 | 487 | SAENFITRMTNYDQYLPDQKVLPKHSLLYEKFAVYNELTKVKFIA--EGMRDYqFLDSGQKKDIVKTLFK--TKR-KVTA | 561 |
| WP_044676715 | 487 | SAENFITRMTNYDQYLPDQKVLPKHSLLYEKFAVYNELTKVRYVT--EQGKSF-FFDANMKQEIFDGVFK--VYR-KVTK | 560 |
| WP_044680361 | 487 | SAENFITRMTNYDQYLPDQKVLPKHSLLYEKFAVYNELTKVRYVT--EQGKSF-FFDANMKQEIFDGVFK--VYR-KVTK | 560 |
| WP_044681799 | 487 | SAENFITRMTNYDQYLPDQKVLPKHSLLYEKFAVYNELTKVKFIA--EGMRDYqFLDSGQKKDIVKTLFK--TKR-KVTA | 561 |
| WP_049533112 | 487 | SAEKFITRMTLNDLYLPEEKVLPKHSLLYETFTVYNELTKVKYVN--EQGEAK-FFDANMKQEIFDHVEK--ENR-KVTK | 560 |
| WP_029090905 | 472 | SSEAFIKRMTNKCTYLIHEDVIPKHSFSYAKFEVLNELNKIRLDG------KP--IDIPLKKRIFEGLFL---EKtKVTQ | 540 |
| WP_006506696 | 499 | TAEGFIKRMRSYCTYFPDEEVLPKNSLIVSKYEVYNELNKIRVDD--------kLLEVDVKNDIYNELFM--KNK-TVTE | 567 |
| AIT42264 | 487 | SAQSFIERMTNEDKNLPNEKVLPKHSLLYEYFTVYNELTKVKYVT--EGMRKPaELSGEQKKAIVDLLFK--TNR-KVTV | 561 |
| WP_034440723 | 494 | SAELFIENLTSRDTYLPDEPVLPKRSLIYQKFTIFNELTKISYID--ERGILQ-NFSSREKIAIFNDLFK---NKsKVTK | 567 |
| AKQ21048 | 487 | SAQSFIERMTNEDKNLPNEKVLPKHSLLYEYFTVYNELTKVKYVT--EGMRKPaELSGEQKKAIVDLLFK--TNR-KVTV | 561 |
| WP_004636532 | 489 | SAEKFIERMTNMDTYLLEEKVLPKRSLLYQTFEVYNELTKVRYTN--EQGKTE-KLNRQQKAEIIETLFK-qKNR--VRE | 562 |
| WP_002364836 | 496 | SATAFIERMTNEDTYLPSEKVLPKHSLLYEKFMVFNELTKISYTD--DRGIKA-NFSGKEKEKIFDYLFK--TRR-KVKK | 569 |
| WP_016631044 | 447 | SATAFIERMTNEDTYLPSEKVLPKHSLLYEKFMVFNELTKISYTD--DRGIKA-NFSGKEKEKIFDYLFK--TRR-KVKK | 520 |
| EMS75795 | 232 | SAMKFIQRMINYDTYLPTEKVLPKHSILYQKYTIFNELTKVAYKD--ERGIKH-QFSSKEKREIFKELFQ--KQR-KVTV | 305 |
| WP_002373311 | 496 | SATAFIERMTNEDTYLPSEKVLPKHSLLYEKFMVFNELTKISYTD--DRGIKA-NFSGKEKEKIFDYLFK--TRR-KVKK | 569 |
| WP_002378009 | 496 | SATAFIERMTNEDTYLPSEKVLPKHSLLYEKFMVFNELTKISYTD--DRGIKA-NFSGKEKEKIFDYLFK--TRR-KVKK | 569 |
| WP_002407324 | 496 | SATAFIERMTNEDTYLPSEKVLPKHSLLYEKFMVFNELTKISYTD--DRGIKA-NFSGKEKEKIFDYLFK--TRR-KVKK | 569 |
| WP_002413717 | 496 | SATAFIERMTNEDTYLPSEKVLPKHSLLYEKFMVFNELTKISYTD--DRGIKA-NFSGKEKEKIFDYLFK--TRR-KVKK | 569 |
| WP_010775580 | 498 | SATAFIERMTNEDTYLPSEKVLPKHSLLYEKFMVFNELTKISYTD--DRGIKA-NFSGKEKEKIFDYLFK--TRR-KVKK | 571 |
| WP_010818269 | 496 | SATAFIERMTNEDTYLPSEKVLPKHSLLYEKFMVFNELTKISYTD--DRGIKA-NFSGKEKEKIFDYLFK--TRR-KVKK | 569 |
| WP_010824395 | 496 | SATAFIERMINFDTYLPSEKVLPKHSLLYEKFMVFNELTKISYTD--DRGIKA-NFSGKEKEKIFDYLFK--TRR-KVKK | 569 |
| WP_016622645 | 496 | SATAFIERMINFDTYLPSEKVLPKHSLLYEKFMVFNELTKISYTD--DRGIKA-NFSGKEKEKIFDYLFK--TRR-KVKK | 569 |
| WP_033624816 | 496 | SATAFIERMINFDTYLPSEKVLPKHSLLYEKFMVFNELTKISYTD--DRGIKA-NFSGKEKEKIFDYLFK--TRR-KVKK | 569 |
| WP_033625576 | 496 | SATAFIERMINFDTYLPSEKVLPKHSLLYEKFMVFNELTKISYTD--DRGIKA-NFSGKEKEKIFDYLFK--TRR-KVKK | 569 |
| WP_033789179 | 496 | SATAFIERMINFDTYLPSEKVLPKHSLLYEKFMVFNELTKISYTD--DRGIKA-NFSGKEKEKIFDYLFK--TRR-KVKK | 569 |
| WP_002310644 | 493 | SAVRFIERMINTDMYMPHNKVLPKNSLLYQKFSIYNELTKVRYQD--ERGQMN-YFSSIEKKEIFHELFE--KNR-KVIK | 566 |
| WP_002312694 | 494 | SAVRFIERMINTDMYMPHNKVLPKNSLLYQKFSIYNELTKVRYQD--ERGQMN-YFSSIEKKEIFHELFE--KNR-KVIK | 567 |
| WP_002314015 | 494 | SAVRFIERMNNTDMYIPHNKVLPKNSLLYQKFSIYNELTKVRYQD--ERGQMN-YFSSIEKKEIFHELFE--KNR-KVIK | 567 |
| WP_002320716 | 494 | SAVRFIERMINTDMYIPHNKVLPKNSLLYQKFSIYNELTKVRYQD--ERGQMN-YFSSIEKKEIFHELFE--KNR-KVIK | 567 |
| WP_002330729 | 493 | SAVRFIERMINTDMYIPHNKVLPKNSLLYQKFSIYNELTKVRYQD--ERGQMN-YFSSIEKKEIFHELFE--KNR-KVIK | 566 |
| WP_002335161 | 494 | SAVRFIERMINTDMYMPHNKVLPKNSLLYQKFSIYNELTKVRYQD--ERGQMN-YFSSIEKKEIFHELFE--KNR-KVIK | 567 |
| WP_002345439 | 494 | SAVRFIERMINTDMYIPHNKVLPKNSLLYQKFSIYNELTKVRYQD--ERGQMN-YFSSIEKKEIFHELFE--KNR-KVIK | 567 |
| WP_034867970 | 487 | SAMRFIQRMTKQDTYLPTEKVLPKNSLLYQKYMIFNELTKVSYKD--ERGVKQ-YFSGDEKQQIFKQLFQ--KERgKITV | 561 |
| WP_047937432 | 494 | SAVRFIERMINTDMYMPHNKVLPKNSLLYQKFSIYNELTKVRYQD--ERGQMN-YFSSIEKKEIFHELFE--KNR-KVIK | 567 |
| WP_010720994 | 487 | SAMRFIQRMTKQDTYLPTEKVLPKNSLFYQKYMIFNELTKVSYKD--ERGVKQ-YFSGDEKQQIFKQLFQ--KERgKITV | 561 |
| WP_010737004 | 487 | SAMRFIQRMTKQDTYLPTEKVLPKNSLLYQKYMIFNELTKVSYKD--ERGVKQ-YFSGDEKQQIFKQLFQ--KERgKITV | 561 |
| WP_034700478 | 487 | SAMRFIQRMTKQDTYLPTEKVLPKNSLLYQKYMIFNELTKVSYKD--ERGVKQ-YFSGDEKQQIFKQLFQ--KERgKITV | 561 |
| WP_007209003 | 491 | SAVAFIERMTIKDIYL-NENVLPRHSLIYEKFTVFNELTKVLYAD--DRGVFQ-RFSAEEKEDIFEKLFK--SER-KVIK | 563 |
| WP_023519017 | 486 | SAIEFIERMINQDTYLPKEKVLPKQSLIYQRFMIFNELTKVSYTD--ERGKSH-YFSSEQKRKIFNELFK--QHP-RVIE | 559 |
| WP_010770040 | 490 | SATKFIERMINFDTYLPTEKVLPKHSMIYEKYMVYNELTKVSYVD--ERGMNQ-RFSGEEKKQIVEELFK--QSR-KVIK | 563 |
| WP_048604708 | 486 | SAELFIERMINFDLYLPSEKVLPKHSMLYEKYTVYNELTKVTYKD--EQGKVQ-NFSSEEKERIFIDLFK--QHR-KVIK | 559 |
| WP_010750235 | 487 | SATKFIQRMINYDTYLPTEKVLPKYSMLYQKYTIFNELTKVAYKD--DRGIKH-QFSSEEKLRIFQELFK--KQR-RVIK | 560 |
| AII16583 | 526 | SAQSFIERMINFDKNLPNEKVLPKHSLLYEYFTVYNELTKVKYVT--EGMRKPaFLSGEQKKAIVDLLFK--TNR-KVIV | 600 |
| WP_029073316 | 507 | TADEFIKRMRNFCTYFPDEPVLAKNSLIVSKYEVLNEINKLRIND--------hLIKRDIKDKMLHTLFM--DHK-SISA | 575 |
| WP_031589969 | 507 | TADEFIKRMRNECTYFPDEPVMAKNSLIVSKYEVLNEINKLRIND--------hLIKRDMKDKMLHTLFM--DHK-SISA | 575 |
| KDA45870 | 485 | SAEDFIKRMTINDLYLPTEPVLPKHSLLYERYTIFNELAGVRYVT--ENGEAK-YEDAQTKRSIFE-LFKl--DR-KVSE | 557 |
| WP_039099354 | 510 | SANEFIKRMITIDTYLLAEDVLPKQSLIYQRFEVLNELNGLKIDD--QPITTE------LKQAIFTDLFM---QKtSVTV | 578 |
| AKP02966 | 484 | SSNKFIRRMTVIDSYLVGEPVLPKNSLIYQRYEVLNELNNIRITEnlKINPIGsRLIVETKQHIYNELFK--NYK-KITV | 560 |
| WP_010991369 | 493 | SAVDFIEKMINKDTYLPKENVLPKHSLCYQKYLVYNELTKVRYIN--DQGKTS-YFSGQEKEQIENDLFK--QKR-KVKK | 566 |
| WP_033838504 | 493 | SAVDFIEKMINKDTYLPKENVLPKHSLCYQKYLVYNELTKVRYIN--DQGKTS-YFSGQEKEQIENDLFK--QKR-KVKK | 566 |
| EHN60060 | 496 | SAVDFIEKMINKDTYLPKENVLPKHSLCYQKYLVYNELTKVRYIN--DQGKTS-YFSGQEKEQIENDLFK--QKR-KVKK | 569 |
| EFR89594 | 262 | SAVDFIEKMINKDTYLPKENVLPKHSLCYQKYLVYNELTKVRYIN--DQGKTS-YFSGQEKEQIENDLFK--QKR-KVKK | 335 |
| WP_038409211 | 493 | SAIDFIEKMINKDTYLPKENVLPKHSLCYQKYMVYNELTKIRYID--DQGKTH-HFSGQEKQQIFNGLFK--QQR-KVKK | 566 |
| EFR95520 | 112 | SAIDFIEKMINKDTYLPKENVLPKHSLCYQKYMVYNELTKIRYID--DQGKTH-HFSGQEKQQIFNGLFK--QQR-KVKK | 185 |
| WP_003723650 | 493 | SAVDFIEKMINKDTYLPKENVLPKHSLCYQKYMVYNELTKIRYID--DQGKIN-YFSGREKQQVFNDLFK--QKR-KVKK | 566 |
| WP_003727705 | 493 | SAVDFIEKMINKDTYLPKENVLPKHSLCYQKYMVYNELTKIRYID--DQGKIN-YFSGREKQQIENDLFK--QKR-KVKK | 566 |
| WP_003730785 | 493 | SAVDFIEKMINKDTYLPKENVLPKHSLCYQKYMVYNELTKIRYID--DQGKIN-YFSGREKQQIENDLFK--QKR-KVKK | 566 |
| WP_003733029 | 493 | SAVDFIEKMINKDTYLPKENVLPKHSLCYQKYMVYNELTKVRYID--DQGKIN-YFSGQEKQQIENDLFK--QKR-KVKK | 566 |
| WP_003739838 | 493 | SAVDFIEKMINKDTYLPKENVLPKHSLYYQKYMVYNELTKVRYID--DQGKIN-YFSGQEKQQIENDYFK--QKR-KVSK | 566 |
| WP_014601172 | 493 | SAVDFIEKMTNKDTYLPKENVLPKHSLCYQKYMVYNELTKVRYID--DQGKTN-YFSGQEKQQIENDLEK--QKR-KVKK | 566 |
| WP_023548323 | 493 | SAVDFIEKMTNKDTYLPKENVLPKHSLCYQKYMVYNELTKIRYID--DQGKTN-YFSGQEKQQIENDLEK--QKR-KVKK | 566 |
| WP_031665337 | 493 | SAVDFIEKMTNKDTYLPKENVLPKHSLCYQKYMVYNELTKVRYID--DQGKTN-YFSGQEKQQIENDLEK--QKR-KVKK | 566 |
| WP_031669209 | 493 | SAVDFIEKMTNKDTYLPKENVLPKHSLCYQKYMVYNELTKVRYID--DQGKTN-YFSGQEKQQIENDLEK--QKR-KVKK | 566 |
| WP_033920898 | 493 | SAVDFIEKMTNKDTYLPKENVLPKHSLCYQKYMVYNELTKIRYID--DQGKTN-YFSGQEKQQIENDLEK--QKR-KVKK | 566 |
| AKI42028 | 496 | SAVDFIEKMTNKDTYLPKENVLPKHSLCYQKYMVYNELTKVRYID--DQGKTN-YFSGQEKQQIENDLEK--QKR-KVKK | 569 |
| AKI50529 | 496 | SAVDFIEKMTNKDTYLPKENVLPKHSLCYQKYMVYNELTKIRYID--DQGKTN-YFSGQEKQQIENDLEK--QKR-KVKK | 569 |
| EFR83390 | 1 | ---------------------------------------------------------------IFNDLFK--QKR-KVKK | 14 |
| WP_046323366 | 493 | SAIDFIEKMTNKDTYLPKENVLPKHSMCYQKYMVYNELTKIRYTD--DQGKTH-YESGQEKQQIENDLEK--QKR-KVKK | 566 |
| AKE81011 | 503 | SAQSFIERMTNEDKNLPNEKVLPKHSLLYEYFTVYNELTKVKYVT--EGMRKPaELSGEQKKAIVDLLFK--TNR-KVTV | 577 |
| CUO82355 | 503 | TAEGFIKRMRSYCTYFPDEEVLPKNSLIVSKYEVYNELNKIRVDD--------kLLEVDVKNDIYNELFM--KNK-TVTE | 571 |
| WP_033162887 | 504 | TAEGFIERMKNTGTYFPDEPVMAKNSLTVSKFEVLNELNKIRING--------kLIAVETKKELLSDLFM--KNK-TITD | 572 |
| AGZ01981 | 520 | SAQSFIERMTNEDKNLPNEKVLPKHSLLYEYFTVYNELTKVKYVT--EGMRKPaELSGEQKKAIVDLLFK--TNR-KVTV | 594 |
| AKA60242 | 487 | SAQSFIERMTNEDKNLPNEKVLPKHSLLYEYFTVYNELTKVKYVT--EGMRKPaELSGEQKKAIVDLLFK--TNR-KVTV | 561 |
| AKS40380 | 487 | SAQSFIERMTNEDKNLPNEKVLPKHSLLYEYFTVYNELTKVKYVT--EGMRKPaELSGEQKKAIVDLLFK--TNR-KVTV | 561 |
| 4UN5_B | 491 | SAQSFIERMTNEDKNLPNEKVLPKHSLLYEYFTVYNELTKVKYVT--EGMRKPaELSGEQKKAIVDLLFK--TNR-KVTV | 565 |
| WP_010922251 | 562 | KQLKEDYFKK--IECFDSVEISGVEDR---FNASLGTYHDLLKIIKDK DFLDNEENEDILEDIVLTLTLFEDREMIE | 633 |
| WP_039695303 | 564 | EKLLNYLNKE--FPEYRIKDLIGLDKEnkSFNASLGTYHDLKKIL-DK AFLDDKVNEEVIEDIIKTLTLFEDKDMIH | 637 |
| WP_045635197 | 562 | KDIIHYLHN---VDGYDGIELKGIEKQ---FNASLSTYHDLLKIIKDK EFMDDAKNEAILENIVHTLTIFEDREMIK | 632 |
| 5AXW_A | 300 | KQIAKEILVNe--EDIKGYRVISIGKPe---FTNLKVYHDIKDITARK ------ENAELLDQIAKILTIYQSSEDIQ | 368 |
| WP_009880683 | 246 | KQLKEDYFKK--IECFDSVEISGVEDR---FNASLGTYHDLLKIIKDK DFLDNEENEDILEDIVLTLTLFEDREMIE | 317 |
| WP_010922251 | 562 | KQLKEDYFKK--IECFDSVEISGVEDR---FNASLGTYHDLLKIIKDK DFLDNEENEDILEDIVLTLTLFEDREMIE | 633 |
| WP_011054416 | 562 | KQLKEDYFKK--IECFDSVEISGVEDR---FNASLGTYHDLLKIIKDK DFLDNEENEDILEDIVLTLTLFEDREMIE | 633 |
| WP_011284745 | 562 | KQLKEDYFKK--IECFDSVEISGVEDR---FNASLGTYHDLLKIIKDK DFLDNEENEDILEDIVLTLTLFEDREMIE | 633 |
| WP_011285506 | 562 | KQLKEDYFKK--IECFDSVEISGVEDR---FNASLGTYHDLLKIIKDK DFLDNEENEDILEDIVLTLTLFEDREMIE | 633 |
| WP_011527619 | 562 | KQLKEDYFKK--IECFDSVEISGVEDR---FNASLGTYHDLLKIIKDK DFLDNEENEDILEDIVLTLTLFEDREMIE | 633 |
| WP_012560673 | 562 | KQLKEDYFKK--IECFDSVEISGVEDR---FNASLGTYHDLLKIIKDK DFLDNEENEDILEDIVLTLTLFEDREMIE | 633 |
| WP_014407541 | 562 | KQLKEDYFKK--IECFDSVEISGVEDR---FNASLGAYHDLLKIIKDK DFLDNEENEDILEDIVLTLTLFEDRGMIE | 633 |
| WP_020905136 | 562 | KQLKEDYFKK--IECFDSVEISGVEDR---FNASLGTYHDLLKIIKDK DFLDNEENEDILEDIVLTLTLFEDREMIE | 633 |
| WP_023080005 | 562 | KQLKEDYFKK--IECFDSVEISGVEDR---FNTSLGTYHDLLKIIKDK DFLDNEENEDILEDIVLTLTLFEDKEMIE | 633 |
| WP_023610282 | 562 | KQLKEDYFKK--IECFDSVEISGVEDR---FNTSLGTYHDLLKIIKDK DFLDNEENEDILEDIVLTLTLFEDKEMIE | 633 |
| WP_030125963 | 562 | KQLKEDYFKK--IECFDSVEISGVEDR---FNASLGTYHDLLKIIKDK DFLDNEENEDILEDIVLTLTLFEDREMIE | 633 |
| WP_030126706 | 562 | KQLKEDYFKK--IECFDSVEISGVEDR---FNASLGTYHDLLKIIKDK DFLDNEENEDILEDIVLTLTLFEDREMIE | 633 |
| WP_031488318 | 562 | KQLKEDYFKK--IECFDSVEISGVEDR---FNASLGTYHDLLKIIKDK DFLDNEENEDILEDIVLTLTLFEDREMIE | 633 |
| WP_032460140 | 562 | KQLKEDYFKK--IECFDSVEISGVEDR---FNASLGTYHDLLKIIKDK DFLDNEENEDILEDIVLTLTLFEDREMIE | 633 |
| WP_032461047 | 562 | KQLKEDYFKK--IECFDSVEISGVEDR---FNASLGTYHDLLKIIKDK DFLDNEENEDILEDIVLTLTLFEDREMIE | 633 |
| WP_032462016 | 562 | KQLKEDYFKK--IECFDSVEISGVEDR---FNASLGTYHDLLKIIKDK DFLDNEENEDILEDIVLTLTLFEDREMIE | 633 |
| WP_032462936 | 562 | KQLKEDYFKK--IECFDSVEISGVEDR---FNASLGTYHDLLKIIKDK DFLDNEENEDILEDIVLTLTLFEDKEMIE | 633 |
| WP_032464890 | 562 | KQLKEDYFKK--IECFDSVEISGVEDR---FNASLGTYHDLLKIIKDK DFLDNEENEDILEDIVLTLTLFEDREMIE | 633 |
| WP_033888930 | 387 | KQLKEDYFKK--IECFDSVEISGVEDR---FNASLGTYHDLLKIIKDK DFLDNEENEDILEDIVLTLTLFEDREMIE | 458 |
| WP_038431314 | 562 | KQLKEDYFKK--IECFDSVEISGVEDR---FNASLGTYHDLLKIIKDK DFLDNEENEDILEDIVLTLTLFEDREMIE | 633 |
| WP_038432938 | 562 | KQLKEDYFKK--IECFDSVEISGVEDR---FNTSLGTYHDLLKIIKDK DFLDNEENEDILEDIVLTLTLFEDKEMIE | 633 |
| WP_038434062 | 562 | KQLKEDYFKK--IECFDSVEISGVEDR---FNASLGTYHDLLKIIKDK DFLDNEENEDILEDIVLTLTLFEDREMIE | 633 |
| BAQ51233 | 473 | KQLKEDYFKK--IECFDSVEISGVEDR---FNASLGTYHDLLKIIKDK DFLDNEENEDILEDIVLTLTLFEDREMIE | 544 |
| KGE60162 | | ------------------------------------------------ ----------------------------- | |
| KGE60856 | | ------------------------------------------------ ----------------------------- | |
| WP_002989955 | 562 | KQLKEDYFKK--IECFDSVEISGVEDR---FNASLGTYHDLLKIIKDK DFLDNEENEDILEDIVLTLTLFEDREMIE | 633 |
| WP_003030002 | 561 | DKLLNYLNKE--FEEFRIVNLIGLDKEnkAFNSSLGTYHDLRKIL-DK SFLDDKANEKTIEDIIQTLTLFEDREMIR | 634 |
| WP_003065552 | 564 | EKLLNYLNKE--FPEYRIKDLIGLDKEnkSFNASLGTYHDLKKIL-DK AFLDDKVNEEVIEDIIKTLTLFEDKDMIH | 637 |
| WP_001040076 | 563 | KDIISFLNK---VDGYEGIAIKGIEKQ---FNASLSTYHDLKKIL-GK DFLDNIDNELILEDIVQTLTLFEDREMIK | 632 |
| WP_001040078 | 562 | KKLLDFLAKE--YEEFRIVDVIGLDKEnkAFNASLGTYHDLEKIL-DK DFLDNPDNESILEDIVQTLTLFEDREMIK | 635 |
| WP_001040080 | 562 | KKLLDFLAKE--YEEFRIVDVIGLDKEnkAFNASLGTYHDLEKIL-DK DFLDNPDNESILEDIVQTLTLFEDREMIK | 635 |
| WP_001040081 | 562 | KKLLDFLAKE--YEEFRIVDVIGLDKEnkAFNASLGTYHDLEKIL-DK DFLDNPDNESILEDIVQTLTLFEDREMIK | 635 |
| WP_001040083 | 562 | KKLLDFLAKE--YEEFRIVDVIGLDKEnkAFNASLGTYHDLEKIL-DK DFLDNPDNESILEDIIQTLTLFEDREMIK | 635 |
| WP_001040085 | 562 | KKLLDFLAKE--YEEFRIVDVIGLDKEnkAFNASLGTYHDLEKIL-DK DFLDNPDNESILEDIVQTLTLFEDREMIK | 635 |
| WP_001040087 | 562 | KKLLDFLAKE--YEEFRIVDVIGLDKEnkAFNASLGTYHDLEKIL-DK DFLDNPDNESILEDIVQTLTLFEDREMIK | 635 |
| WP_001040088 | 562 | KKLLDFLAKE--YEEFRIVDVIGLDKEnkAFNASLGTYHDLEKIL-DK DFLDNPDNESILEDIVQTLTLFEDREMIK | 635 |
| WP_001040089 | 562 | KKLLDFLAKE--YEEFRIVDVIGLDKEnkAFNASLGTYHDLEKIL-DK DFLDNPDNESILEDIVQTLTLFEDREMIK | 635 |
| WP_001040090 | 562 | KKLLDFLAKE--YEEFRIVDVIGLDKEnkAFNASLGTYHDLEKIL-DK DFLDNPDNESILEDIVQTLTLFEDREMIK | 635 |
| WP_001040091 | 562 | KKLLDFLAKE--YEEFRIVDVIGLDKEnkAFNASLGTYHDLEKIL-DK DFLDNPDNESILEDIVQTLTLFEDREMIK | 635 |
| WP_001040092 | 562 | KQLLDFLAKE--FEEFRIVDVTGLDKEnkAFNASLGTYHDLKKIL-DK DFLDNPDNESILEDIVQTITLFEDREMIK | 635 |
| WP_001040094 | 563 | KDIISFLNK---VDGYEGIAIKGIEKQ---FNASLSTYHDLKKIL-GK DFLDNIDNELILEDIVQTLTLFEDREMIR | 632 |
| WP_001040095 | 563 | KDIISFLNK---VDGYEGIAIKGIEKQ---FNASLSTYHDLKKIL-GK DFLDNIDNELILEDIVQTLTLFEDREMIR | 632 |
| WP_001040096 | 563 | KDIISFLNK---VDGYEGIAIKGIEKQ---FNASLSTYHDLKKIL-GK DFLDNIDNELILEDIVQTLTLFEDREMIR | 632 |
| WP_001040097 | 563 | KDIISFLNK---VDGYEGIAIKGIEKQ---FNASLSTYHDLKKIL-GK DFLDNIDNELILEDIVQTLTLFEDREMIR | 632 |
| WP_001040098 | 563 | KDIISFLNK---VDGYEGIAIKGIEKQ---FNASLSTYHDLKKIL-GK DFLDNIDNELILEDIVQTLTLFEDREMIR | 632 |
| WP_001040099 | 563 | KDIISFLNK---VDGYEGIAIKGIEKQ---FNASLSTYHDLKKIL-GK DFLDNIDNELILEDIVQTLTLFEDREMIR | 632 |
| WP_001040100 | 563 | KDIISFLNK---VDGYEGIAIKGIEKQ---FNASLSTYHDLKKIL-GK DFLDNIDNELILEDIVQTLTLFEDREMIR | 632 |
| WP_001040104 | 562 | KKLLDFLAKE--YEEFRIVDVIGLDKEnkAFNASLGTYHDLEKIL-DK DFLDNPDNESILEDIVQTLTLFEDREMIK | 635 |
| WP_001040105 | 562 | KKLLDFLAKE--YEEFRIVDVIGLDKEnkAFNASLGTYHDLEKIL-DK DFLDNPDNESILEDIVQTLTLFEDREMIK | 635 |
| WP_001040106 | 562 | KKLLDFLAKE--YEEFRIVDVIGLDKEnkAFNASLGTYHDLKKIL-DK DFLDNPDNESILEDIVQTLTLFEDREMIK | 635 |
| WP_001040107 | 562 | KKLLDFLAKE--YEEFRIVDVIGLDKEnkAFNASLGTYHDLKKIL-DK DFLDNPDNESILEDIVQTLTLFEDREMIK | 635 |
| WP_001040108 | 562 | KKLLDFLAKE--YEEFRIVDVIGLDKEnkAFNASLGTYHDLKKIL-DK DFLDNPDNESILEDIVQTLTLFEDREMIK | 635 |
| WP_001040109 | 562 | KKLLDFLAKE--YEEFRIVDVIGLDKEnkAFNASLGTYHDLKKIL-DK DFLDNPDNESILEDIVQTLTLFEDREMIK | 635 |
| WP_001040110 | 562 | KKLLDFLAKE--YEEFRIVDVIGLDKEnkAFNASLGTYHDLKKIL-DK DFLDNPDNESILEDIVQTLTLFEDREMIK | 635 |
| WP_015058523 | 562 | KQLLDFLAKE--FEEFRIVDVTGLDKEnkAFNASLGTYHDLKKIL-DK DFLDNPDNESILEDIVQTITLFEDREMIK | 635 |
| WP_017643650 | 563 | KDIISFLNK---VDGYEGIAIKGIEKQ---FNASLSTYHDLKKIL-GK DFLDNIDNELILEDIVQTLTLFEDREMIR | 632 |
| WP_017647151 | 562 | KKLLDFLAKE--YEEFRIVDVIGLDKEnkAFNASLGTYHDLKKIL-DK DFLDNPDNESILEDIVQTLTLFEDREMIK | 635 |
| WP_017648376 | 562 | KKLLDFLAKE--YEEFRIVDVIGLDKEnkAFNASLGTYHDLKKIL-DK DFLDNPDNESILEDIVQTLTLFEDREMIK | 635 |
| WP_017649527 | 562 | KKLLDFLAKE--YEEFRIVDVIGLDKEnkAFNASLGTYHDLEKIL-DK DFLDNPDNESILEDIVQTLTLFEDREMIK | 635 |
| WP_017771611 | 562 | KKLLDFLAKE--YEEFRIVDVIGLDKEnkAFNASLGTYHDLKKIL-DK DFLDNPDNESILEDIVQTLTLFEDREMIK | 635 |
| WP_017771984 | 562 | KKLLDFLAKE--YEEFRIVDVIGLDKEnkAFNASLGTYHDLEKIL-DK DFLDNPDNESILEDIVQTLTLFEDREMIK | 635 |
| CFQ25032 | 562 | KKLLDFLAKE--YEEFRIVDVIGLDKEnkAFNASLGTYHDLEKIL-DK DFLDNPDNESILEDIVQTLTLFEDREMIK | 635 |
| CFV16040 | 562 | KKLLDFLAKE--YEEFRIVDVIGLDKEnkAFNASLGTYHDLEKIL-DK DFLDNPDNESILEDIVQTLTLFEDREMIK | 635 |
| KLJ37842 | 562 | KKLLDFLAKE--YEEFRIVDVIGLDKEnkAFNASLGTYHDLEKIL-DK DFLDNPDNESILEDIVQTLTLFEDREMIK | 635 |
| KLJ72361 | 562 | KKLLDFLAKE--YEEFRIVDVIGLDKEnkAFNASLGTYHDLEKIL-DK DFLDNPDNESILEDIVQTLTLFEDREMIK | 635 |
| KLL20707 | 562 | KKLLDFLAKE--YEEFRIVDVIGLDKEnkAFNASLGTYHDLEKIL-DK DFLDNPDNESILEDIVQTLTLFEDREMIK | 635 |
| KLL42645 | 562 | KKLLDFLAKE--YEEFRIVDVIGLDKEnkAFNASLGTYHDLKKIL-DK DFLDNPDNESILEDIVQTLTLFEDREMIK | 635 |
| WP_047207273 | 562 | KKLLDFLAKE--YEEFRIVDVIGLDKEnkAFNASLGTYHDLEKIL-DK DFLDNPDNESILEDIVQTLTLFEDREMIK | 635 |
| WP_047209694 | 563 | KDIISFLNK---VDGYEGIAIKGIEKQ---FNASLSTYHDLKKIL-GK DFLDNIDNELILEDIVQTLTLFEDREMIR | 632 |
| WP_050198062 | 562 | KKLLDFLAKE--YEEFRIVDVIGLDKEnkAFNASLGTYHDLEKIL-DK DFLDNPDNESILEDIVQTLTLFEDREMIK | 635 |
| WP_050201642 | 562 | KKLLDFLAKE--YEEFRIVDVIGLDKEnkAFNASLGTYHDLEKIL-DK DFLDNPDNESILEDIVQTLTLFEDREMIK | 635 |
| WP_050204027 | 562 | KKLLDFLAKE--YEEFRIVDVIGLDKEnkAFNASLGTYHDLKKIL-DK DFLDNPDNESILEDIVQTLTLFEDREMIK | 635 |
| WP_050881965 | 562 | KKLLDFLAKE--YEEFRIVDVIGLDKEnkAFNASLGTYHDLEKIL-DK DFLDNPDNESILEDIVQTLTLFEDREMIK | 635 |
| WP_050886065 | 562 | KKLLDFLAKE--YEEFRIVDVIGLDKEnkAFNASLGTYHDLEKIL-DK DFLDNPDNESILEDIVQTLTLFEDREMIK | 635 |
| AHN30376 | 562 | KQLLDFLAKE--FEEFRIVDVTGLDKEnkAFNASLGTYHDLKKIL-DK DFLDNPDNESILEDIVQTITLFEDREMIK | 635 |
| EAO78426 | 562 | KKLLDFLAKE--YEEFRIVDVIGLDKEnkAFNASLGTYHDLEKIL-DK DFLDNPDNESILEDIVQTLTLFEDREMIK | 635 |
| CCW42055 | 562 | KQLLDFLAKE--FEEFRIVDVTGLDKEnkAFNASLGTYHDLEKIL-GK DFLDNPDNESILEDIVQTLTLFEDREMIK | 635 |
| WP_003041502 | 561 | DKLLNYLNKE--FEEFRIVNLTGLDKEnkVENSSLGTYHDLRKIL-NK SFLDNKENAQIIEDIIQTLTLFEDREMIR | 634 |
| WP_037593752 | 562 | DKLLNYLNKE--FEEFRIVNLTGLDKEnkAENSSLGTYHDLRKIL-DK SFLDDKANEKTIEDIIQTLTLFEDREMIR | 635 |
| WP_049516684 | 562 | DKLLNYLNKE--FEEFRIVNLTGLDKEnkAFNASLGTYHDLRKIL-DK SFLDDKVNEKIIEDIIQTLTLFEDREMIR | 635 |
| GAD46167 | 561 | DKLLNYLNKE--FEEFRIVNLTGLDKEnkAENSSLGTYHDLRKIL-DK SFLDDKANEKTIEDIIQTLTLFEDREMIR | 634 |
| WP_018363470 | 562 | EKLLNYLDKE--FPEYRIQDLVGLDKEnkSFNASLGTYHDLKKIL-DK SFLDDKVNEEVIEDIIKTLTLFEDREMIQ | 635 |
| WP_003043819 | 572 | KQLKEDYFKK--IECFDSVEIIGVEDR---FNASLGTYHDLLKIIKDK DELDNEENEDILEDIVLILTLFEDREMIE | 643 |
| WP_006269658 | 561 | DKLLNYLNKE--FEEFRIVNLTGLDKEnkAENSSLGTYHDLRKIL-DK SFLDDKANEKTIEDIIQTLTLFEDREMIR | 634 |
| WP_048800889 | 561 | DKLLNYLDKE--FDEFRIVDLTGLDKEnkAFNASLGTYHDLRKIL-DK SFLDDKANEKTIEDIIQTLTLFEDREMIR | 634 |
| WP_012767106 | 562 | KQLKEDYFKK--IECFDSVEISGVEDR---FNASLGTYHDLLKIIKDK DELDNEENEDILEDIVLILTLFEDKEMIE | 633 |
| WP_014612333 | 562 | KQLKEDYFKK--IECFDSVEISGVEDR---FNASLGTYHDLLKIIKDK DELDNEENEDILEDIVLILTLFEDKEMIE | 633 |
| WP_015017095 | 562 | KQLKEDYFKK--IECFDSVEISGVEDR---FNASLGTYHDLLKIIKDK DELDNEENEDILEDIVLILTLFEDKEMIE | 633 |
| WP_015057649 | 562 | KQLKEDYFKK--IECFDSVEISGVEDR---FNASLGTYHDLLKIIKDK DELDNEENEDILEDIVLILTLFEDKEMIE | 633 |
| WP_048327215 | 562 | KQLKEDYFKK--IECFDSVEISGVEDR---FNASLGTYHDLLKIIKDK DELDNEENEDILEDIVLILTLFEDKEMIE | 633 |
| WP_049519324 | 562 | KQLKEDYFKK--IECFDSVEISGVEDR---FNASLGTYHDLLKIIKDK DELDNEENEDILEDIVLILTLFEDKEMIE | 633 |
| WP_012515931 | 562 | KQLKENYFKK--IECWDSVEITGVEDS---FNASLGTYHDLLKIIQDK DFLDNPDNQKIIEDIILTLTLFEDKKMIS | 633 |
| WP_021320964 | 562 | KQLKENYFKK--IECWDSVEITGVEDS---FNASLGTYHDLLKIIQDK DFLDNPDNQKIIEDIILTLTLFEDKKMIS | 633 |
| WP_037581760 | 562 | KQLKENYFKK--IECWDSVEITGVEDS---FNASLGTYHDLLKIIQDK DFLDNPDNQKIIEDIILTLTLFEDKKMIS | 633 |
| WP_004232481 | 561 | AKLLSYLNNE--FEEFRINDLIGLDKDskSFNASLGTYHDLKKIL-DK SFLDDKTNEQIIEDIVLTLTLFEDRDMIH | 634 |
| WP_009854540 | 562 | EKLLNYLNKE--FPEYRIKDLIGLDKEnkSFNASLGTYHDLKKIL-DK AFLDDKVNEEVIEDIIKTLTLFEDKDMIH | 635 |
| WP_012962174 | 562 | DKFLNYLNKE--FPEYRIQDLIGLDKEnkSFNASLGTYHDLKKIL-DK SFLDDKTNETIIEDIIQTLTLFEDRDMIR | 635 |
| WP_039695303 | 564 | EKLLNYLNKE--FPEYRIKDLIGLDKEnkSFNASLGTYHDLKKIL-DK AFLDDKVNEEVIEDIIKTLTLFEDKDMIH | 637 |
| WP_014334983 | 561 | AKLLSYLNNE--FEEFRINDLIGLDKDskSFNASLGTYHDLKKIL-DK SELDDKINGQIIEDIVLILTLFEDRDMIH | 634 |
| WP_003099269 | 562 | KQLKEEYESK--MKCFHTVTILGVEDR---FNASLGTYHDLLKIFKDK AFLDDEANQDILEEIVWTLTLFEDQAMIE | 633 |
| AHY15608 | 562 | KQLKEEYESK--MKCFHTVTILGVEDR---FNASLGTYHDLLKIFKDK AFLDDEANQDILEEIVWTLTLFEDQAMIE | 633 |
| AHY17476 | 562 | KQLKEEYESK--MKCFHTVTILGVEDR---FNASLGTYHDLLKIFKDK AFLDDEANQDILEEIVWTLTLFEDQAMIE | 633 |
| ESR09100 | | ------------------------------------------------ ----------------------------- | |
| AGM98575 | 562 | KQLKEEYESK--MKCFHTVTILGVEDR---FNASLGTYHDLLKIFKDK AFLDDEANQDILEEIVWTLTLFEDQAMIE | 633 |
| ALF27331 | 561 | DKLMDFLEKE--FDEFRIVDLTGLDKEnkAFNASYGTYHDLRKIL-DK DELDNSKNEKILEDIVLILTLFEDREMIR | 634 |
| WP_018372492 | 574 | RKLKDFIEKElgYGYIDIDNIKGVEEQ---FNASYTTYQDLLKIIGDK EFLDNEENKDLLEEIIYILTVFEDRKMIE | 647 |
| WP_045618028 | 563 | KDIIQYLHN---VDSYDGIELKGIEKQ---FNASLSTYHDLLKIIKDK EFMDDSKNEAILENIVHTLTIFEDREMIK | 633 |
| WP_045635197 | 562 | KDIIHYLHN---VDGYDGIELKGIEKQ---FNASLSTYHDLLKIIKDK EFMDDAKNEAILENIVHTLTIFEDREMIK | 632 |
| WP_002263549 | 561 | DKLMDFLEKE--FDEFRIVDLTGLDKEnkVFNASYGTYHDLCKIL-DK DELDNSKNEKILEDIVLILTLFEDREMIR | 634 |
| WP_002263887 | 561 | DKLMDFLEKE--FDEFRIVDLTGLDKEnkVFNASYGTYHDLCKIL-DK DELDNSKNEKILEDIVLILTLFEDREMIR | 634 |
| WP_002264920 | 561 | DKLMDFLEKE--FDEFRIVDLTGLDKEnkAFNASYGTYHDLRKIL-DK DELDNSKNEKILEDIVLILTLFEDREMIR | 634 |
| WP_002269043 | 561 | DKLMDFLEKE--FDEFRIVDLTGLDKEnkAFNASYGTYHDLRKIL-DK DELDNSKNEKILEDIVLILTLFEDREMIR | 634 |
| WP_002269448 | 561 | DKLMDFLEKE--FDEFRIVDLTGLDKEnkVFNASYGTYHDLCKIL-DK DELDNSKNEKILEDIVLILTLFEDREMIR | 634 |
| WP_002271977 | 561 | DKLMDFLEKE--FDEFRIVDLTGLDKEnkVFNASYGTYHDLCKIL-DK DELDNSKNEKILEDIVLILTLFEDREMIR | 634 |
| WP_002272766 | 561 | DKLMDFLEKE--FDEFRIVDLTGLDKEnkVFNASYGTYHDLCKIL-DK DELDNSKNEKILEDIVLILTLFEDREMIR | 634 |
| WP_002273241 | 561 | DKLMDFLEKE--FDEFRIVDLTGLDKEnkVFNASYGTYHDLCKIL-DK DELDNSKNEKILEDIVLILTLFEDREMIR | 634 |
| WP_002275430 | 561 | DKLMDFLEKE--FDEFRIVDLTGLDKEnkAFNASYGTYHDLRKIL-DK DELDNSKNEKILEDIVLILTLFEDREMIR | 634 |
| WP_002276448 | 561 | DKLMDFLEKE--FDEFRIVDLTGLDKEnkVFNASYGTYHDLCKIL-DK DELDNSKNEKILEDIVLILTLFEDREMIR | 634 |
| WP_002277050 | 561 | KKLRTFLDKN--FDEFRIVDIQGLDKEteTENASYATYQDLLKVIKDK VFMDNPENAEILENIVLTLTLFEDREMIK | 635 |
| WP_002277364 | 561 | DKLMDFLEKE--FDEFRIVDLTGLDKEnkAFNASYGTYHDLRKIL-DK DELDNSKNEKILEDIVLILTLFEDREMIR | 634 |
| WP_002279025 | 561 | DKLMDFLEKE--FDEFRIVDLTGLDKEnkAFNASYGTYHDLRKIL-DK DELDNSKNEKILEDIVLILTLFEDREMIR | 634 |
| WP_002279859 | 561 | DKLMDFLEKE--FDEFRIVDLTGLDKEnkAFNASYGTYHDLRKIL-DK DELDNSKNEKILEDIVLILTLFEDREMIR | 634 |
| WP_002280230 | 561 | DKLMDFLEKE--FDEFRIVDLTGLDKEnkVFNASYGTYHDLCKIL-DK DELDNSKNEKILEDIVLILTLFEDREMIR | 634 |
| WP_002281696 | 561 | DKLMDFLEKE--FDEFRIVDLTGLDKEnkAFNASYGTYHDLRKIL-DK DELDNSKNEKILEDIVLILTLFEDREMIR | 634 |
| WP_002282247 | 561 | KKLRTFLDKN--FDEFRIVDIQGLDKEteTENASYATYQDLLKVIKDK VFMDNPENAEILENIVLTLTLFEDREMIK | 635 |
| WP_002282906 | 561 | DKLMDFLEKE--FDEFRIVDLTGLDKEnkVFNASYGTYHDLCKIL-DK DELDNSKNEKILEDIVLILTLFEDREMIR | 634 |
| WP_002283846 | 561 | DKLMDFLEKE--FDEFRIVDLTGLDKEnkAFNASYGTYHDLRKIL-DK DELDNSKNEKILEDIVLILTLFEDREMIR | 634 |
| WP_002287255 | 561 | DKLMDFLEKE--FDEFRIVDLTGLDKEnkAFNASYGTYHDLRKIL-DK DELDNSKNEKILEDIVLILTLFEDREMIR | 634 |
| WP_002288990 | 561 | DKLMDFLEKE--FDEFRIVDLTGLDKEnkAFNASYGTYHDLRKIL-DK DELDNSKNEKILEDIVLILTLFEDREMIR | 634 |
| WP_002289641 | 561 | DKLMDFLEKE--FDEFRIVDLTGLDKEnkVFNASYGTYHDLCKIL-DK DELDNSKNEKILEDIVLILTLFEDREMIR | 634 |
| WP_002290427 | 561 | DKLMDFLEKE--FDEFRIVDLTGLDKEnkAFNASYGTYHDLRKIL-DK DELDNSKNEKILEDIVLILTLFEDREMIR | 634 |
| WP_002295753 | 561 | DKLMDFLEKE--FDEFRIVDLTGLDKEnkVFNASYGTYHDLCKIL-DK DELDNSKNEKILEDIVLILTLFEDREMIR | 634 |
| WP_002296423 | 561 | DKLMDFLEKE--FDEFRIVDLTGLDKEnkAFNASYGTYHDLRKIL-DK DELDNSKNEKILEDIVLILTLFEDREMIR | 634 |
| WP_002304487 | 571 | DKLLNYLNKE--FEEFRIVNLTGLDKEnkVENSSLGTYHDLRKIL-NK SFLDNKENEQIIEDIIQTLTLFEDREMIR | 644 |
| WP_002305844 | 561 | DKLMDFLEKE--FDEFRIVDLTGLDKEnkVFNASYGTYHDLCKIL-DK DELDNSKNEKILEDIVLILTLFEDREMIR | 634 |
| WP_002307203 | 561 | DKLMDFLEKE--FDEFRIVDLTGLDKEnkAFNASYGTYHDLRKIL-DK DELDNSKNEKILEDIVLILTLFEDREMIR | 634 |
| WP_002310390 | 561 | DKLMDFLEKE--FDEFRIVDLTGLDKEnkAFNASYGTYHDLRKIL-DK DELDNSKNEKILEDIVLILTLFEDREMIR | 634 |
| WP_002352408 | 561 | DKLMDFLEKE--FDEFRIVDLTGLDKEnkAFNASYGTYHDLRKIL-DK DELDNSKNEKILEDIVLILTLFEDREMIR | 634 |
| WP_012997688 | 561 | DKLMDFLEKE--FDEFRIVDLTGLDKEnkAFNASYGTYHDLRKIL-DK DELDNSKNEKILEDIVLILTLFEDREMIR | 634 |
| WP_014677909 | 561 | DKLMDFLEKE--FDEFRIVDLTGLDKEnkAFNASYGTYHDLRKIL-DK DELDNSKNEKILEDIVLILTLFEDREMIR | 634 |
| WP_019312892 | 561 | DKLMDFLEKE--FDEFRIVDLTGLDKEnkAFNASYGTYHDLRKIL-DK DELDNSKNEKILEDIVLILTLFEDREMIR | 634 |
| WP_019313659 | 561 | DKLMDFLEKE--FDEFRIVDLTGLDKEnkVFNASYGTYHDLCKIL-DK DELDNSKNEKILEDIVLILTLFEDREMIR | 634 |
| WP_019314093 | 561 | DKLMDFLEKE--FDEFRIVDLTGLDKEnkAFNASYGTYHDLRKIL-DK DELDNSKNEKILEDIVLILTLFEDREMIR | 634 |
| WP_019315370 | 561 | DKLMDFLEKE--FDEFRIVDLTGLDKEnkAFNASYGTYHDLRKIL-DK DELDNSKNEKILEDIVLILTLFEDREMIR | 634 |
| WP_019803776 | 561 | DKLMDFLEKE--FDEFRIVDLTGLDKEnkVFNASYGTYHDLCKIL-DK DELDNSKNEKILEDIVLILTLFEDREMIR | 634 |
| WP_019805234 | 561 | DKLMDFLEKE--FDEFRIVDLTGLDKEnkAFNASYGTYHDLRKIL-DK DELDNSKNEKILEDIVLILTLFEDREMIR | 634 |
| WP_024783594 | 561 | DKLMDFLEKE--FDEFRIVDLTGLDKEnkVFNASYGTYHDLCKIL-DK DELDNSKNEKILEDIVLILTLFEDREMIR | 634 |
| WP_024784288 | 561 | KKLRTFLDKN--FDEFRIVDIQGLDKEteTENASYATYQDLLKVIKDK VFMDNPENAEILENIVLTLTLFEDREMIK | 635 |
| WP_024784666 | 561 | DKLMDFLEKE--FDEFRIVDLTGLDKEnkAFNASYGTYHDLRKIL-DK DELDNSKNEKILEDIVLILTLFEDREMIR | 634 |
| WP_024784894 | 561 | DKLMDFLEKE--FDEFRIVDLTGLDKEnkVFNASYGTYHDLCKIL-DK DELDNSKNEKILEDIVLILTLFEDREMIR | 634 |
| WP_024786433 | 561 | KKLRTFLDKN--FDEFRIVDIQGLDKEteTENASYATYQDLLKVIKDK VFMDNPENAEILENIVLTLTLFEDREMIK | 635 |
| WP_049473442 | 561 | DKLMDFLEKE--FDEFRIVDLTGLDKEnkVFNASYGIYHDLCKIL-DK DFLDNSKNEKILEDIVLTLTLFEDREMIR | 634 |
| WP_049474547 | 561 | DKLMDFLEKE--FDEFRIVDLTGLDKEnkVFNASYGIYHDLCKIL-DK DFLDNSKNEKILEDIVLTLTLFEDREMIR | 634 |
| EMC03581 | 554 | DKLMDFLEKE--FDEFRIVDLTGLDKEnkAFNASYGIYHDLRKIL-DK DFLDNSKNEKILEDIVLTLTLFEDREMIR | 627 |
| WP_000428612 | 565 | KDIIQYLHT---VDGYDGIELKGIEKQ---FNASLSTYHDLLKIIKDK EFMDDPNNEEILENIVHTLTIFEDREMIK | 635 |
| WP_000428613 | 563 | KDIIQFLHN---VDGYDGIELKGIEKQ---FNASLSTYHDLLKIIKDK EFMDDSKNEEILENIVHTLTIFEDREMIK | 633 |
| WP_049523028 | 562 | KDIIHYLHN---VDGYDGIELKGIEKH---FNSSLSTYHDLLKIIKDK EFMDDPKNEEIFENIVHTLTIFEDRVMIK | 632 |
| WP_003107102 | 531 | KQLKENYFNK--IRCLDSITISGVEDK---FNASLGTYHDLLNIIKNQ KILDDEQNQDSLEDIVLTLTLFEDEKMIA | 602 |
| WP_054279288 | 564 | KQLKEDFFSK--IECFDTVDISGVEDK---FNASLGTYHDLLKIIKDK AFLDNSENENIIEDIILTLTLFEDKEMIA | 635 |
| WP_049531101 | 563 | KDLIHYLHN---VDGYDGIELKGIEKQ---FNASLSTYHDLLKIIKDK RFMDEPKNQEILENIVHTLTIFEDREMIK | 633 |
| WP_049538452 | 563 | KDIIQYLHN---VDGYDGIELKGIEKQ---FNASLSTYHDLLKIIKDK EFMDDSKNEEILENIVHTLTIFEDREMIK | 633 |
| WP_049549711 | 563 | KDIIHYLHT---VDGYDGIELKGIEKQ---FNASLSTYHDLLKIIKDK EFMDDSKNEAILENIVHTLTIFEDREMIK | 633 |
| WP_007896501 | 565 | KDLKEKYFSQ--IEGLENVDVTGVEGA---FNASLGTYNDLLKIIKDK AFLDDEANAEILEEIVLILTLFQDEKLIE | 636 |
| EFR44625 | 517 | KDLKEKYFSQ--IEGLENVDVTGVEGA---FNASLGTYNDLLKIIKDK AFLDDEANAEILEEIVLILTLFQDEKLIE | 588 |
| WP_002897477 | 562 | KDIIHYLHN---VDGYDGIELKGIEKQ---FNANLSTYHDLLKITKDK EFMDDPKNEEILENIVHTLTIFEDREMIK | 632 |
| WP_002906454 | 562 | KDIIHYLHN---VDGYDGIELKGIEKQ---FNASLSTYHDLLKIIKDK EFMDNPKNGEILENIIHTLTIFEDREMIK | 632 |
| WP_009729476 | 563 | KDIIQFLHN---VDGYDGIELKGIEKQ---FNASLSTYHDLLKIIKDK AFMDDAKNEAILENIVHTLTIFEDREMIK | 633 |
| CQR24647 | 562 | KKILNFLDKN--FDEFRITDIQGLDNEtgNFNASYGIYHDLLKIIGDK EFMDSSDNVDVLEDIVLSLTLFEDREMIK | 636 |
| WP_000066813 | 565 | KDIIHYLHN---VDGYDGIELKGIEKQ---FNASLSTYHDLLKIIKDK AFMDDSKNEEILENIIHTLTIFEDREMIK | 635 |
| WP_009754323 | 563 | KDIIHYLHN---VDGYDGIELKGIEKQ---FNASLSTYHDLLKIIKDK EFMDNHKNQEILENIVHTLTIFEDREMIK | 633 |
| WP_044674937 | 562 | KDIKAYL-EN--SNGYAGVELKGLEEQ---FNASLPTYHDLLKILRDK AFIDAEENQEILEDIVLTLTLFEDREMIR | 632 |
| WP_044676715 | 561 | EKLMDFLGKE--FDEFRIVDLLGLDKDnkSFNASLGTYHDLKKIV-SK DLLDNPENEDILENVVLTLTLFEDREMIR | 634 |
| WP_044680361 | 561 | EKLMDFLGKE--FDEFRIVDLLGLDKDnkSFNASLGTYHDLKKIV-SK DLLDNPENEDILENVVLTLTLFEDREMIR | 634 |
| WP_044681799 | 562 | KDIKAYL-EN--SNGYAGVELKGLEEQ---FNASLPTYHDLLKILRDK AFIDAEENQEILEDIVLTLTLFEDREMIR | 632 |
| WP_049533112 | 561 | DKLLNYLGKE--FDEFRIVDLTGLDKEnkVFNSSLGTYHDLRKIL-DK SFLDNKENEQIIEDIIQTLTLFEDREMIR | 634 |
| WP_029090905 | 541 | TSLKKWLAEH---EHMTVSVVQGTQKEt-EFATSLQAFHRFVKIF-DR ETVSNPANEEMFEKIIYWSTVFEDKKIMR | 612 |
| WP_006506696 | 568 | KKLKNWLVNNgcCS--KDAEIKGFQKEn-QESTSLIPWIDETNIFGKI ----DQSNFDLIENIIYDLTVFEDKKIMK | 637 |
| AIT42264 | 562 | KQLKEDYFKK--IECFDSVEISGVEDR---FNASLGTYHDLLKIIKDK DFLDNEENEDILEDIVLTLTLFEDREMIE | 633 |
| WP_034440723 | 568 | NQLVKYIENK---EQIIAPEIKGIEDS---FNSNYSTYIDLSKIPDMK --LLEKDEDEILEEIIKILTIFEDRKMRK | 637 |
| AKQ21048 | 562 | KQLKEDYFKK--IECFDSVEISGVEDR---FNASLGTYHDLLKIIKDK DFLDNEENEDILEDIVLTLTLFEDREMIE | 633 |
| WP_004636532 | 563 | KDIANYLEQ---YGYVDGTDIKGVEDK---FNASLSTYNDLAKIDGAK AYLDDPEYADVWEDIIKILTIFEDKAMRK | 633 |
| WP_002364836 | 570 | KDIIQFYRNE--YN-TEIVILSGLEED--QFNASFSTYQDLLKCGLIR AELDHPDNAEKLEDIIKILTIFEDRQRIR | 641 |
| WP_016631044 | 521 | KDIIQFYRNE--YN-TEIVILSGLEED--QFNASFSTYQDLLKCGLIR AELDHPDNAEKLEDIIKILTIFEDRQRIR | 592 |
| EMS75795 | 306 | KKLQQFLSAN--YN-IEDAEILGVDKA---FNSSYATYHDFLDLAKPN ELLEQPEMNAMFEDIVKILTIFEDREMIR | 381 |
| WP_002373311 | 570 | KDIIQFYRNE--YN-TEIVILSGLEED--QFNASFSTYQDLLKCGLIR AELDHPDNAEKLEDIIKILTIFEDRQRIR | 641 |
| WP_002378009 | 570 | KDIIQFYRNE--YN-TEIVILSGLEED--QFNASFSTYQDLLKCGLIR AELDHPDNAEKLEDIIKILTIFEDRQRIR | 641 |
| WP_002407324 | 570 | KDIIQFYRNE--YN-TEIVILSGLEED--QFNASFSTYQDLLKCGLIR AELDHPDNAEKLEDIIKILTIFEDRQRIR | 641 |
| WP_002413717 | 570 | KDIIQFYRNE--YN-TEIVILSGLEED--QFNASFSTYQDLLKCGLIR AELDHPDNAEKLEDIIKILTIFEDRQRIR | 641 |
| WP_010775580 | 572 | KDIIQFYRNE--YN-TEIVILSGLEED--QFNASFSTYQDLLKCGLIR AELDHPDNAEKLEDIIKILTIFEDRQRIR | 643 |
| WP_010818269 | 570 | KDIIQFYRNE--YN-TEIVILSGLEED--QFNASFSTYQDLLKCGLIR AELDHPDNAEKLEDIIKILTIFEDRQRIR | 641 |
| WP_010824395 | 570 | KDIIQFYRNE--YN-TEIVTLSGLEED--QFNASFSTYQDLLKCGLTR AELDHPDNAEKLEDIIKILTIFEDRQRIR | 641 |
| WP_016622645 | 570 | KDIIQFYRNE--YN-TEIVTLSGLEED--QFNASFSTYQDLLKCGLTR AELDHPDNAEKLEDIIKILTIFEDRQRIR | 641 |
| WP_033624816 | 570 | KDIIQFYRNE--YN-TEIVTLSGLEED--QFNASFSTYQDLLKCGLTR AELDHPDNAEKLEDIIKILTIFEDRQRIR | 641 |
| WP_033625576 | 570 | KDIIQFYRNE--YN-TEIVTLSGLEED--QFNASFSTYQDLLKCGLTR AELDHPDNAEKLEDIIKILTIFEDRQRIR | 641 |
| WP_033789179 | 570 | KDIIQFYRNE--YN-TEIVTLSGLEED--QFNASFSTYQDLLKCGLTR AELDHPDNAEKLEDIIKILTIFEDRQRIR | 641 |
| WP_002310644 | 567 | KDLQEFLYLK--YD-IKHAELSGIEKA---FNASYTTYHDFLTMSENK QWLEDPELASMFEEIIKILTVFEDREMIK | 641 |
| WP_002312694 | 568 | KDLQEFLYLK--YD-IKHAELSGIEKA---FNASYTTYHDFLTMSENK QWLEDPELASMFEEIIKILTVFEDREMIK | 642 |
| WP_002314015 | 568 | KDLQEFLYLK--YD-IKHAELSGIEKA---FNASYTTYHDFLTMSENK QWLEDPELASMFEEIIKILTVFEDREMIK | 642 |
| WP_002320716 | 568 | KDLQEFLYLK--YD-IKHAELSGIEKA---FNASYTTYHDFLTMSENK QWLEDPELASMFEEIIKILTVFEDREMIK | 642 |
| WP_002330729 | 567 | KDLQEFLYLK--YD-IKHAELSGIEKA---FNASYTTYHDFLTMSENK QWLEDPELASMFEEIIKILTVFEDREMIK | 641 |
| WP_002335161 | 568 | KDLQEFLYLK--YD-IKHAELSGIEKA---FNASYTTYHDFLTMSENK QWLEDPELASMFEEIIKILTVFEDREMIK | 642 |
| WP_002345439 | 568 | KDLQEFLYLK--YD-IKHAELSGIEKA---FNASYTTYHDFLTMSENK QWLEDPELASMFEEIIKILTVFEDREMIK | 642 |
| WP_034867970 | 562 | KKLQNFLYTH--YH-IENAQIFGIEKA---FNASYSTYHDFMKLAKTN EWLEQPEMEPIFEDIVKILTIFEDRQMIK | 637 |
| WP_047937432 | 568 | KDLQEFLYLK--YD-IKHAELSGIEKA---FNASYTTYHDFLTMSENK QWLEDPELASMFEEIIKILTVFEDREMIK | 642 |
| WP_010720994 | 562 | KKLQNFLYTH--YH-IENAQIFGIEKA---FNASYSTYHDFMKLAKTN EWLEQPEMEPIFEDIVKILTIFEDRQMIK | 637 |
| WP_010737004 | 562 | KKLQNFLYTH--YH-IENAQIFGIEKA---FNASYSTYHDFMKLAKTN EWLEQPEMEPIFEDIVKILTIFEDRQMIK | 637 |
| WP_034700478 | 562 | KKLQNFLYTH--YH-IENAQIFGIEKA---FNASYSTYHDFMKLAKTN EWLEQPEMEPIFEDIVKILTIFEDRQMIK | 637 |
| WP_007209003 | 564 | KKLENYLRIEl---SISSPSVKGIEEQ---FNANFGTYLDLKKFDELH PYLDDEKYQDTLEEVIKVLTVFEDRSMIQ | 634 |
| WP_023519017 | 560 | KQLRKFLELN--EQ-IDSTEIKGIETS---FNASYSTYHDLLKLS--- ILLDDPDMITMFEEIIKILTIFEDREMIR | 631 |
| WP_010770040 | 564 | KLLEKFLSNE--FG-LVDVAIKGIE-T--SFNAGYGTYHDFLKIGITR EQLDKEENSETLEEIVKILTVFEDRKMIR | 634 |
| WP_048604708 | 560 | KDLSNFLRNE--YN-LDDVIIDGIE-N--KFNASFNTYHDFLKLKIDP KVLDDPANEPMFEEIVKILTIFEDRKMLR | 630 |
| WP_010750235 | 561 | KKLQHFLSAN--YN-IEDAEILGVDKV---FNSSYATYHDFLELAKPY ELLEQPEMEEMFEDIVKIITIFEDREMVR | 636 |
| AII16583 | 601 | KQLKEDYFKK--IECFDSVEISGVEDR---FNASLGTYHDLLKIIKDK DFLDNEENEDILEDIVLTLTLFEDREMIE | 672 |
| WP_029073316 | 576 | NAMKKWLVKNgyFSNIDDIKIEGFQKEn-ACSTSLIPWIDETKIFGEI ----NNSNYELIEKIIYDVTVFEDKKILR | 647 |
| WP_031589969 | 576 | NAMKKWLVKNgyFSNIDDIKIEGFQKEn-ACSTSLIPWIDETKIFGKI ----NESNYDFIEKIIYDVTVFEDKKILR | 647 |
| KDA45870 | 558 | KMVIKHLKVV--MPAIRIQALKGLDNGk--FNASYGTYKDLVDMGVAP ELLNDEVNSEKWEDIIKTLTIFEGRKLIK | 630 |
| WP_039099354 | 579 | KNIQDYLVSEk--RYASRPAITGLSDEnk-FNSRLSTYHDLKTIVGDA --VDDVDKQADLEKCIEWSTIFEDGKIYS | 650 |
| AKP02966 | 561 | KKLIKWLIAQg---YYKNPILIGLSQKd-EFNSTLITYLDMKKIFGSS -FMENNKNYNQIEELIEWLTIFEDKQILN | 632 |
| WP_010991369 | 567 | KDLELFLRNM--SH-VESPTIEGLE-D--SFNSSYSTYHDLLKVGIKQ EILDNPVNTEMLENIVKILTVFEDKRMIK | 637 |
| WP_033838504 | 567 | KDLELFLRNM--SH-VESPTIEGLE-D--SFNSSYSTYHDLLKVGIKQ EILDNPVNTEMLENIVKILTVFEDKRMIK | 637 |
| EHN60060 | 570 | KDLELFLRNM--SH-VESPTIEGLE-D--SFNSSYSTYHDLLKVGIKQ EILDNPVNTEMLENIVKILTVFEDKRMIK | 640 |
| EFR89594 | 336 | KDLELFLRNM--SH-VESPTIEGLE-D--SFNSSYSTYHDLLKVGIKQ EILDNPVNTEMLENIVKILTVFEDKRMIK | 406 |
| WP_038409211 | 567 | KDLERFLYTI--NH-IESPTIEGVE-D--AFNSSFATYHDLQKGGVTQ EILDNPLNADMLEEIVKILTVFEDKRMIK | 637 |
| EFR95520 | 186 | KDLERFLYTI--NH-IESPTIEGVE-D--AFNSSFATYHDLQKGGVTQ EILDNPLNADMLEEIVKILTVFEDKRMIK | 256 |
| WP_003723650 | 567 | KDLELFLRNI--NH-IESPTIEGLE-D--SFNASYATYHDLLKVGMKQ EILDNPLNTEMLEDIVKILTVFEDKPMIK | 637 |
| WP_003727705 | 567 | KDLELFLRNI--NH-IESPTIEGLE-D--SFNASYATYHDLLKVGLKQ EILDNPLNTEILEDIVKILTVFEDKRMIK | 637 |
| WP_003730785 | 567 | KDLELFLRNI--NH-IESPTIEGLE-D--SFNASYATYHDLLKVGLKQ EILDNPLNTEILEDIVKILTVFEDKRMIK | 637 |
| WP_003733029 | 567 | KDLELFLRNI--NQ-IESPTIEGLE-D--SFNASYATYHDLLKVGMKQ EILDNPLNTEMLEDIVKILTVFEDKRMIK | 637 |
| WP_003739838 | 567 | KDLEQFLRNM--SH-IESPTIEGLE-D--SENSSYATYHDLLKVGIKQ EVLENPLNTEMLEDIVKILTVFEDKRMIK | 637 |
| WP_014601172 | 567 | KDLELFLRNI--NH-IESPTIEGLE-D--SFNASYATYHDLLKVGMKQ EILDNPLNTEMLEDIVKILTVFEDKPMIK | 637 |
| WP_023548323 | 567 | KDLELFLRNI--NH-VESPTIEGLE-D--SFNASYATYHDLMKVGIKQ EILDNPLNTEMLEDIVKILTVFEDKPMIK | 637 |
| WP_031665337 | 567 | KDLELFLRNI--NQ-IESPTIEGLE-D--SFNASYATYHDLLKVGMKQ EILDNPLNTEMLEDIVKILTVFEDKPMIK | 637 |
| WP_031669209 | 567 | KDLELFLRNI--NQ-IESPTIEGLE-D--SFNASYATYHDLLKVGMKQ EILDNPLNTEMLEDIVKILTVFEDKPMIK | 637 |
| WP_033920898 | 567 | KDLELFLRNI--NH-VESPTIEGLE-D--SFNASYATYHDLMKVGIKQ EILDNPLNTEMLEDIVKILTVFEDKPMIK | 637 |
| AKI42028 | 570 | KDLELFLRNI--NH-IESPTIEGLE-D--SFNASYATYHDLLKVGMKQ EILDNPLNTEMLEDIVKILTVFEDKPMIK | 640 |
| AKI50529 | 570 | KDLELFLRNI--NH-VESPTIEGLE-D--SFNASYATYHDLMKVGIKQ EILDNPLNTEMLEDIVKILTVFEDKPMIK | 640 |
| EFR83390 | 15 | KDLELFLRNI--NQ-IESPTIEGLE-D--SFNASYATYHDLLKVGMKQ EILDNPLNTEMLEDIVKILTVFEDKPMIK | 85 |
| WP_046323366 | 567 | KDLELFLYNM--NH-VESPTVEGVE-D--AFNSSFTTYHDLQKVGVPQ EILDDPLNTEMLEEIIKILTVFEDKRMIN | 637 |
| AKE81011 | 578 | KQLKEDYFKK--IECFDSVEISGVEDR---FNASLGTYHDLLKIIKDK DELDNEENEDILEDIVLILTLFEDREMIE | 649 |
| CUO82355 | 572 | KKLKNWLVNNqcCR--KDAEIKGFQKEn-QESTSLTPWIDETNIFGKI ----DQSNFDLIEKIIYDLTVFEDKKIMK | 641 |
| WP_033162887 | 573 | KKLKDWLVTHqyYDINEELKIEGYQKDl-QESTSLAPWIDETKIFGEI ----NASNYQLIEKIIYDISIFEDKKILK | 644 |
| AGZ01981 | 595 | KQLKEDYFKK--IECFDSVEISGVEDR---FNASLGTYHDLLKIIKDK DELDNEENEDILEDIVLILTLFEDREMIE | 666 |
| AKA60242 | 562 | KQLKEDYFKK--IECFDSVEISGVEDR---FNASLGTYHDLLKIIKDK DELDNEENEDILEDIVLILTLFEDREMIE | 633 |
| AKS40380 | 562 | KQLKEDYFKK--IECFDSVEISGVEDR---FNASLGTYHDLLKIIKDK DELDNEENEDILEDIVLILTLFEDREMIE | 633 |
| 4UN5_B | 566 | KQLKEDYFKK--IECFDSVEISGVEDR---FNASLGTYHDLLKIIKDK DELDNEENEDILEDIVLILTLFEDREMIE | 637 |
| WP_010922251 | 634 | [chemical structure] | 702 |
| WP_039695303 | 638 | ERLQKYSDIFTANQLKKLER-RHYTGWGRLSYKLINGIRNK ENNKTILDYLI DDG---SANRNFMQLINDDIL | 706 |
| WP_045635197 | 633 | QRLAQYDSLFDEKVIKALTR-RHYTGWGKLSAKLINGICDK QTGNTILDYLI DDG---KINRNFMQLINDDGL | 701 |
| 5AXW_A | 369 | EELTNLNSELTQEEIEQISN1KGYIGTHNLSLKAINLILDE ---------LW -------TNDNQIAIFNRLKL | 426 |
| WP_009880683 | 318 | ERLKTYAHLFDDKVMKQLKR-RRYTGWGRLSRKLINGIRDK QSGKTILDFLK -DGf---ANRNFMQLIHDDSL | 386 |
| WP_010922251 | 634 | ERLKTYAHLFDDKVMKQLKR-RRYTGWGRLSRKLINGIRDK QSGKTILDFLK -DGf---ANRNFMQLIHDDSL | 702 |
| WP_011054416 | 634 | ERLKTYAHLFDDKVMKQLKR-RRYTGWGRLSRKLINGIRDK QSGKTILDFLK -DGf---ANRNFMQLIHDDSL | 702 |
| WP_011284745 | 634 | ERLKTYAHLFDDKVMKQLKR-RRYTGWGRLSRKLINGIRDK QSGKTILDFLK -DGf---ANRNFMQLIHDDSL | 702 |
| WP_011285506 | 634 | ERLKTYAHLFDDKVMKQLKR-RRYTGWGRLSRKLINGIRDK QSGKTILDFLK -DGf---ANRNFMQLIHDDSL | 702 |
| WP_011527619 | 634 | ERLKTYAHLFDDKVMKQLKR-RRYTVWGRLSRKLINGIRDK QSGKTILDFLK -DGf---ANRNFMQLIHDDSL | 702 |
| WP_012560673 | 634 | ERLKTYAHLFDDKVMKQLKR-RRYTGWGRLSRKLINGIRDK QSGKTILDFLK -DGf---ANRNFMQLIHDDSL | 702 |
| WP_014407541 | 634 | ERLKTYAHLFDDKVMKQLKR-RRYTGWGRLSRKLINGIRDK QSGKTILDFLK -DGf---ANRNFMQLIHDDSL | 702 |
| WP_020905136 | 634 | ERLKTYAHLFDDKVMKQLKR-RRYTGWGRLSRKLINGIRDK QSGKTILDFLK -DGf---ANRNFMQLIHDDSL | 702 |
| WP_023080005 | 634 | ERLKKYANLFDDKVMKQLKR-RHYTGWGRLSRKLINGIRDK QSGKTILDFLK -DGf---ANRNFMQLINDDSL | 702 |
| WP_023610282 | 634 | ERLKKYANLFDDKVMKQLKR-RHYTGWGRLSRKLINGIRDK QSGKTILDFLK -DGf---ANRNFMQLINDDSL | 702 |
| WP_030125963 | 634 | ERLKTYAHLFDDKVMKQLKR-RRYTGWGRLSRKLINGIRDK QSGKTILDFLK -DGf---ANRNFMQLIHDDSL | 702 |
| WP_030126706 | 634 | ERLKTYAHLFDDKVMKQLKR-RRYTGWGRLSRKLINGIRDK QSGKTILDFLK -DGf---ANRNFMQLIHDDSL | 702 |
| WP_031488318 | 634 | ERLKTYAHLFDDKVMKQLKR-RRYTGWGRLSRKLINGIRDK QSGKTILDFLK -DGf---ANRNFMQLIHDDSL | 702 |
| WP_032460140 | 634 | ERLKTYAHLFDDKVMKQLKR-RRYTGWGRLSRKLINGIRDK QSGKTILDFLK -DGf---ANRNFMQLIHDDSL | 702 |
| WP_032461047 | 634 | ERLKTYAHLFDDKVMKQLKR-RRYTGWGRLSRKLINGIRDK QSGKTILDFLK -DGf---ANRNFMQLIHDDSL | 702 |
| WP_032462016 | 634 | ERLKTYAHLFDDKVMKQLKR-RRYTGWGRLSRKLINGIRDK QSGKTILDFLK -DGf---ANRNFMQLIHDDSL | 702 |
| WP_032462936 | 634 | ERLKKYAHLFDDKVMKQLKR-RRYTGWGRLSRKLINGIRDK QSGKTILDFLK -DGf---ANRNFMQLIHDDSL | 702 |
| WP_032464890 | 634 | ERLKTYAHLFDDKVMKQLKR-RRYTGWGRLSRKLINGIRDK QSGKTILDFLK -DGf---ANRNFMQLIHDDSL | 702 |
| WP_033888930 | 459 | ERLKTYAHLFDDKVMKQLKR-RRYTGWGRLSRKLINGIRDK QSGKTILDFLK -DGf---ANRNFMQLIHDDSL | 527 |
| WP_038431314 | 634 | ERLKTYAHLFDDKVMKQLKR-RRYTGWGRLSRKLINGIRDK QSGKTILDFLK -DGf---ANRNFMQLIHDDSL | 702 |
| WP_038432938 | 634 | ERLKKYANLFDDKVMKQLKR-RHYTGWGRLSRKLINGIRDK QSGKTILDFLK -DGf---ANRNFMQLINDDSL | 702 |
| WP_038434062 | 634 | ERLKTYAHLFDDKVMKQLKR-RRYTGWGRLSRKLINGIRDK QSGKTILDFLK -DGf---ANRNFMQLIHDDSL | 702 |
| BAQ51233 | 545 | ERLKTYAHLFDDKVMKQLKR-RRYTGWGRLSRKLINGIRDK QSGKTILDFLK -DGf---ANRNFMQLIHDDSL | 613 |
| KGE60162 | | ----------------------------------------- ----------- --------------------- | |
| KGE60856 | | ----------------------------------------- ----------- --------------------- | |
| WP_002989955 | 634 | ERLKTYAHLFDDKVMKQLKR-RRYTGWGRLSRKLINGIRDK QSGKTILDFLK -DGf---ANRNFMQLIHDDSL | 702 |
| WP_003030002 | 635 | QRLQKYSDIFTKAQLKKLER-RHYTGWGRLSYKLINGIRNK ENKKTILDYLI DDG---YANRNFMQLINDDAL | 703 |
| WP_003065552 | 638 | ERLQKYSDIFTADQLKKLER-RHYTGWGRLSYKLINGIRNK ENNKTILDYLI DDG---SANRNFMQLINDDIL | 706 |
| WP_001040076 | 633 | KRLDIYKDFFTESQLKKLYR-RHYTGWGRLSAKLINGIRNK ENQKTILDYLI DDG---SANRNFMQLIKDAGL | 701 |
| WP_001040078 | 636 | KRLENYKDLFTESQLKKLYR-RHYTGWGRLSAKLINGIRDK ESQKTILDYLI DDG---RSNRNFMQLINDDGL | 704 |
| WP_001040080 | 636 | KRLENYKDLFTESQLKKLYR-RHYTGWGRLSAKLINGIRDK ESQKTILDYLI DDG---RSNRNFMQLINDDGL | 704 |
| WP_001040081 | 636 | KRLENYKDLFTESQLKKLYR-RHYTGWGRLSAKLINGIRDK ESQKTILDYLI DDG---RSNRNFMQLINDDGL | 704 |
| WP_001040083 | 636 | KRLENYKDLFTESQLKKLYR-RHYTGWGRLSAKLINGIRDK ESQKTILDYLI DDG---RSNRNFMQLINDDGL | 704 |
| WP_001040085 | 636 | KRLENYKDLFTESQLKKLYR-RHYTGWGRLSAKLINGIRDK ESQKTILDYLI DDG---RSNRNFMQLINDDGL | 704 |
| WP_001040087 | 636 | KRLENYKDLFTESQLKKLYR-RHYTGWGRLSAKLINGIRDK ESQKTILDYLI DDG---RSNRNFMQLINDDGL | 704 |
| WP_001040088 | 636 | KRLENYKDLFTESQLKKLYR-RHYTGWGRLSAKLINGIRDK ESQKTILDYLI DDG---RSNRNFMQLINDDGL | 704 |
| WP_001040089 | 636 | KRLENYKDLFTESQLKKLYR-RHYTGWGRLSAKLINGIRDK ESQKTILDYLI DDG---RSNRNFMQLINDDGL | 704 |
| WP_001040090 | 636 | KRLENYKDLFTESQLKKLYR-RHYTGWGRLSAKLINGIRDK ESQKTILDYLI DDG---RSNRNFMQLINDDGL | 704 |
| WP_001040091 | 636 | KRLENYKDLFTESQLKKLYR-RHYTGWGRLSAKLINGIRDK ESQKTILDYLI DDG---RSNRNFMQLINDDGL | 704 |
| WP_001040092 | 636 | KRLENYKDLFTESQLKKLYR-RHYTGWGRLSAKLINGIRDR ESQKTILDYLI SDG---RANRNFMQLINDDGL | 704 |
| WP_001040094 | 633 | KRLDIYKDFFTESQLKKLYR-RHYTGWGRLSAKLINGIRNK ENQKTILDYLI DDG---SANRNFMQLIKDAGL | 701 |
| WP_001040095 | 633 | KRLDIYKDFFTESQLKKLYR-RHYTGWERLSAKLINGIRNK ENQKTILDYLI DDG---SANRNFMQLIKDAGL | 701 |
| WP_001040096 | 633 | KRLDIYKDFFTESQLKKLYR-RHYTGWGRLSAKLINGIRNK ENQKTILDYLI DDG---SANRNFMQLIKDAGL | 701 |
| WP_001040097 | 633 | KRLDIYKDFFTESQLKKLYR-RHYTGWGRLSAKLINGIRNK ENQKTILDYLI DDG---SANRNFMQLIKDAGL | 701 |
| WP_001040098 | 633 | KRLDIYKDFFTESQLKKLYR-RHYTGWGRLSAKLINGIRNK ENQKTILDYLI DDG---SANRNFMQLIKDAGL | 701 |
| WP_001040099 | 633 | KRLDIYKDFFTESQLKKLYR-RHYTGWGRLSAKLINGIRNK ENQKTILDYLI DDG---SANRNFMQLIKDAGL | 701 |
| WP_001040100 | 633 | KRLDIYKDFFTESQLKKLYR-RHYTGWGRLSAKLINGIRNK ENQKTILDYLI DDG---SANRNFMQLIKDAGL | 701 |
| WP_001040104 | 636 | KRLENYKDLFTESQLKKLYR-RHYTGWGRLSAKLINGIRDK ESQKTILDYLI DDG---RSNRNFMQLINDDGL | 704 |
| WP_001040105 | 636 | KRLENYKDLFTESQLKKLYR-RHYTGWGRLSAKLINGIRDK ESQKTILDYLI DDG---RSNRNFMQLINDDGL | 704 |
| WP_001040106 | 636 | KRLENYKDLFTESQLKKLYR-RHYTGWGRLSAKLINGIRDK ESQKTILDYLI SDG---RANRNFMQLIHDDGL | 704 |
| WP_001040107 | 636 | KRLENYKDLFTESQLKKLYR-RHYTGWGRLSAKLINGIRDK ESQKTILDYLI SDG---RANRNFMQLIHDDGL | 704 |
| WP_001040108 | 636 | KRLENYKDLFTESQLKKLYR-RHYTGWGRLSAKLINGIRDK ESQKTILDYLI SDG---RANRNFMQLIHDDGL | 704 |
| WP_001040109 | 636 | KRLENYKDLFTESQLKKLYR-RHYTGWGRLSAKLINGIRDK ESQKTILDYLI SDG---RANRNFMQLIHDDGL | 704 |
| WP_001040110 | 636 | KRLENYKDLFTESQLKKLYR-RHYTGWGRLSAKLINGIRDK ESQKTILDYLI SDG---RANRNFMQLIHDDGL | 704 |
| WP_015058523 | 636 | KRLENYKDLFTESQLKKLYR-RHYTGWGRLSAKLINGIRDR ESQKTILDYLI SDG---RANRNFMQLINDDGL | 704 |
| WP_017643650 | 633 | KRLDIYKDFFTESQLKKLYR-RHYTGWGRLSAKLINGIRNK ENQKTILDYLI DDG---SANRNFMQLIKDAGL | 701 |
| WP_017647151 | 636 | KRLENYKDLFTESQLKKLYR-RHYTGWGRLSAKLINGIRDK ESQKTILDYLI DDG---KSNRNFMQLIHDDGL | 704 |
| WP_017648376 | 636 | KRLENYKDLFTESQLKKLYR-RHYTGWGRLSAKLINGIRDK ESQKTILDYLI DDG---KSNRNFMQLIHDDGL | 704 |
| WP_017649527 | 636 | KRLENYKDLFTESQLKKLYR-RHYTGWGRLSAKLINGIRDK ESQKTILDYLI DDG---RSNRNFMQLINDDGL | 704 |
| WP_017771611 | 636 | KRLENYKDLFTESQLKKLYR-RHYTGWGRLSAKLINGIRDK ESQKTILDYLI SDG---RANRNFMQLIHDDGL | 704 |
| WP_017771984 | 636 | KRLENYKDLFTESQLKKLYR-RHYTGWGRLSAKLINGIRDK ESQKTILDYLI DDG---RSNRNFMQLINDDGL | 704 |
| CFQ25032 | 636 | KRLENYKDLFTESQLKKLYR-RHYTGWGRLSAKLINGIRDK ESQKTILDYLI DDG---RSNRNFMQLINDDGL | 704 |
| CFV16040 | 636 | KRLENYKDLFTESQLKKLYR-RHYTGWGRLSAKLINGIRDK ESQKTILDYLI DDG---RSNRNFMQLINDDGL | 704 |
| KLJ37842 | 636 | KRLENYKDLFTESQLKKLYR-RHYTGWGRLSAKLINGIRDK ESQKTILDYLI DDG---RSNRNFMQLINDDGL | 704 |
| KLJ72361 | 636 | KRLENYKDLFTESQLKKLYR-RHYTGWGRLSAKLINGIRDK ESQKTILDYLI DDG---RSNRNFMQLINDDGL | 704 |
| KLL20707 | 636 | KRLENYKDLFTESQLKKLYR-RHYTGWGRLSAKLINGIRDK ESQKTILDYLI DDG---RSNRNFMQLINDDGL | 718 |
| KLL42645 | 636 | KRLENYKDLFTESQLKKLYR-RHYTGWGRLSAKLINGIRDK ESQKTILDYLI SDG---RANRNFMQLIHDDGL | 704 |
| WP_047207273 | 636 | KRLENYKDLFTESQLKKLYR-RHYTGWGRLSAKLINGIRDK ESQKTILDYLI DDG---RSNRNFMQLINDDGL | 704 |
| WP_047209694 | 633 | KRLDIYKDFFTESQLKKLYR-RHYTGWGRLSAKLINGIRNK ENQKTILDYLI DDG---SANRNFMQLIKDAGL | 701 |
| WP_050198062 | 636 | KRLENYKDLFTESQLKKLYR-RHYTGWGRLSAKLINGIRDK ESQKTILDYLI DDG---RSNRNFMQLINDDGL | 704 |
| WP_050201642 | 636 | KRLENYKDLFTESQLKKLYR-RHYTGWGRLSAKLINGIRDK ESQKTILDYLI DDG---RSNRNFMQLINDDGL | 704 |
| WP_050204027 | 636 | KRLENYKDLFTESQLKKLYR-RHYTGWGRLSAKLINGIRDK ESQKTILDYLI SDG---RANRNFMQLIHDDGL | 704 |
| WP_050881965 | 636 | KRLENYKDLFTESQLKKLYR-RHYTGWGRLSAKLINGIRDK ESQKTILDYLI DDG---RSNRNFMQLINDDGL | 704 |
| WP_050886065 | 636 | KRLENYKDLFTESQLKKLYR-RHYTGWGRLSAKLINGIRDK ESQKTILDYLI DDG---RSNRNFMQLINDDGL | 704 |
| AHN30376 | 636 | KRLENYKDLFTESQLKKLYR-RHYTGWGRLSAKLINGIRDR ESQKIILDYLI SDG---RANRNFMQLINDDGL | 704 |
| EAO78426 | 636 | KRLENYKDLFTESQLKKLYR-RHYTGWGRLSAKLINGIRDK ESQKTILDYLI DDG---RSNRNFMQLINDDGL | 704 |
| CCW42055 | 636 | KRLDIYKDFFTESQLKKLYR-RHYTGWGRLSAKLINGIRNK ENQKTILDYLI DDG---SANRNFMQLIKDAGL | 704 |
| WP_003041502 | 635 | QRLQKYSDIFTKAQLKKLER-RHYTGWGRLSYKLINGIRNK ENKKTILDYLI DDG---YANRNFMQLINDDAL | 703 |
| WP_037593752 | 636 | QRLQKYSDIFTKAQLKKLER-RHYTGWGRLSYKLINGIRNK ENKKTILDYLI DDG---YANRNFMQLINDDAL | 704 |
| WP_049516684 | 636 | QRLQKYSDIFTTQQLKKLER-RHYTGWGRLSYKLINGIRNK ENKKTILDYLI DDG---YANRNFMQLINDDAL | 704 |
| GAD46167 | 635 | QRLQKYSDIFTKAQLKKLER-RHYTGWGRLSYKLINGIRNK ENKKTILDYLI DDG---YANRNFMQLINDDAL | 703 |
| WP_018363470 | 636 | QRLQKYSDIFTKQQLKKLER-RHYTGWGRLSYKLINGIRNK ENNKTILDYLI DDG---SANRNFMQLINDDAL | 704 |
| WP_003043819 | 644 | ERLKTYAHLFDDKVMKQLKR-RHYTGWGRLSRKMINGIRDK QSGKTILDFLK -DGf---SNRNFMQLIHDDSL | 712 |
| WP_006269658 | 635 | QRLQKYSDIFTKAQLKKLER-RHYTGWGRLSYKLINGIRNK ENKKTILDYLI DDG---YANRNFMQLINDDAL | 703 |
| WP_048800889 | 635 | QRLQKYSDIFTKAQLKKLER-RHYTGWGRLSYKLINGIRNK ENNKTILEYLV DDG---YANRNFMQLINDDIL | 703 |
| WP_012767106 | 634 | ERLKKYANLFDDKVMKQLKR-RHYTGWGRLSRKLINGIRDK QSGKTILDFLK -DGf---ANRNFMQLINDDSL | 702 |
| WP_014612333 | 634 | ERLKKYANLFDDKVMKQLKR-RHYTGWGRLSRKLINGIRDK QSGKTILDFLK -DGf---ANRNFMQLINDDSL | 702 |
| WP_015017095 | 634 | ERLKTYAHLFDDKVMKQLKR-RHYTGWGRLSRKLINGIRDK QSGKTILDFLK -DGf---ANRNFIQLIHDDSL | 702 |
| WP_015057649 | 634 | ERLKKYANLFDDKVMKQLKR-RHYTGWGRLSRKLINGIRDK QSGKTILDFLK -DGf---ANRNFMQLINDDSL | 702 |
| WP_048327215 | 634 | ERLKTYAHLFDDKVMKQLKR-RHYTGWGRLSRKLINGIRDK QSGKTILDFLK -DGf---ANRNFIQLIHDDSL | 702 |
| WP_049519324 | 634 | ERLKTYAHLFDDKVMKQLKR-RHYTGWGRLSRKLINGIRDK QSGKTILDFLK -DGf---ANRNFIQLIHDDSL | 702 |
| WP_012515931 | 634 | KRLDQYAHLFDKVVLNKLER-HHYTGWGRLSGKLINGIRDK QSGKTILDFLK -DGf---ANRNFMQLIHDSEL | 702 |
| WP_021320964 | 634 | KRLDQYAHLFDKVVLNKLER-HHYTGWGRLSGKLINGIRDK QSGKTILDFLK -DGf---ANRNFMQLIHDSEL | 702 |
| WP_037581760 | 634 | KRLDQYAHLFDKVVLNKLER-HHYTGWGRLSGKLINGIRDK QSGKTILDFLK -DGf---ANRNFMQLIHDSEL | 702 |
| WP_004232481 | 635 | ERLQKYSDIFTSQQLKKLER-RHYTGWGRLSYKLINGIRNK ENNKTILDFLI DDG---DANRNFMQLINDDSL | 703 |
| WP_009854540 | 636 | ERLQKYSDIFTANQLKKLER-RHYTGWGRLSYKLINGIRNK ENNKTILDYLI DDG---SANRNFMQLINDDIL | 704 |
| WP_012962174 | 636 | QRLQKYSDIFTPQQLKKLER-RHYTGWGRLSYKLINGIRNK ENGKSILDYLI DDG---YANRNFMQLISDDTL | 704 |
| WP_039695303 | 638 | ERLQKYSDIFTANQLKKLER-RHYTGWGRLSYKLINGIRNK ENNKTILDYLI DDG---SANRNFMQLINDDIL | 706 |
| WP_014334983 | 635 | ERLQKYSDFFTSQQLKKLER-RHYTGWGRLSYKLINGIRNK ENNKTILDFLI DDG---HANRNFMQLINDESL | 703 |
| WP_003099269 | 634 | RRLVKYADVFEKSVLKKLKK-RHYTGWGRLSQKLINGIKDK QTGKTILGFLK -DGv---ANRNFMQLINDSSL | 702 |
| AHY15608 | 634 | RRLVKYADVFEKSVLKKLKK-RHYTGWGRLSQKLINGIKDK QTGKTILGFLK -DGv---ANRNFMQLINDSSL | 702 |
| AHY17476 | 634 | RRLVKYADVFEKSVLKKLKK-RHYTGWGRLSQKLINGIKDK QTGKTILGFLK -DGv---ANRNFMQLINDSSL | 702 |
| ESR09100 | | ----------------------------------------- ----------- --------------------- | |
| AGM98575 | 634 | RRLVKYADVFEKSVLKKLKK-RHYTGWGRLSQKLINGIKDK QTGKTILGFLK -DGv---ANRNFMQLINDSSL | 702 |
| ALF27331 | 635 | KRLENYSDLLTKEQVKNLER-RHYTGWGRLSAELIHGIRNK ESRKTILDYLI DDG---NSNRNFMQLINDDAL | 703 |
| WP_018372492 | 648 | KRLSELNIPFENKIIKKLAR-KKYTGWGNLSRKLIDGIRNR ETNRTILGHLI DDGf---SNRNLMQLINDDGL | 716 |
| WP_045618028 | 634 | QRLAHYASIFDEKVIKALTR-RHYTGWGKLSAKLINGIYDK QSKKTILDYLI DDG---EINRNFMQLINDDGL | 702 |
| WP_045635197 | 633 | QRLAQYDSLFDEKVIKALTR-RHYTGWGKLSAKLINGICDK QTGNTILDYLI DDG---KINRNFMQLINDDGL | 701 |
| WP_002263549 | 635 | KRLENYSDLLTKEQVKKLER-RHYTGWGRLSAELIHGIRNK ESRKTILDYLI DDG---NSNRNFMQLINDDAL | 703 |
| WP_002263887 | 635 | KRLENYSDLLTKEQVKKLER-RHYTGWGRLSAELIHGIRNK ESRKTILDYLI DDG---NSNRNFMQLINDDAL | 703 |
| WP_002264920 | 635 | KRLKNYSDLLTKEQLKKLER-RHYTGWGRLSAELIHGIRNK ESRKTILDYLI DDG---NSNRNFMQLINDDAL | 703 |
| WP_002269043 | 635 | KRLKNYSDLLTKEQLKKLER-RHYTGWGRLSAELIHGIRNK ESRKTILDYLI DDG---NSNRNFMQLINDDAL | 703 |
| WP_002269448 | 635 | KRLENYSDLLTKEQVKKLER-RHYTGWGRLSAELIHGIRNK ESRKTILDYLI DDG---NSNRNFMQLINDDAL | 703 |
| WP_002271977 | 635 | KRLENYSDLLTKEQVKKLER-RHYTGWGRLSAELIHGIRNK ESRKTILDYLI DDG---NSNRNFMQLINDDAL | 703 |
| WP_002272766 | 635 | KRLENYSDLLTKEQVKKLER-RHYTGWGRLSAELIHGIRNK ESRKTILDYLI DDG---NSNRNFMQLINDDAL | 703 |
| WP_002273241 | 635 | KRLENYSDLLTKEQVKKLER-RHYTGWGRLSAELIHGIRNK ESRKTILDYLI DDG---NSNRNFMQLINDDAL | 703 |
| WP_002275430 | 635 | KRLENYSDLLTKEQVKKLER-RHYTGWGRLSAELIHGIRNK ESRKTLLDYLI DDG---NSNRNFMQLINDDAL | 703 |
| WP_002276448 | 635 | KRLENYSDLLTKEQVKKLER-RHYTGWGRLSAELIHGIRNK ESRKTILDYLI DDG---NSNRNFMQLINDDAL | 703 |
| WP_002277050 | 636 | QRLAKYADVFDKKVIDQLAR-RHYTGWGRLSAKLLNGIRDK QSCKTIMDYLI DDA---QSNRNLMQLITDDNL | 704 |
| WP_002277364 | 635 | KRLENYSDLLTKEQVKKLER-RHYTGWGRLSAELIHGIRNK ESRKTILDYLI DDG---NSNRNFMQLINDDAL | 703 |
| WP_002279025 | 635 | KRLKNYSDLLTKEQLKKLER-RHYTGWGRLSAELIHGIRNK ESRKTILDYLI DDG---NSNRNFMQLINDDAL | 703 |
| WP_002279859 | 635 | KRLKNYSDLLTKEQLKKLER-RHYTGWGRLSAELIHGIRNK ESRKTILDYLI DDG---NSNRNFMQLINDDAL | 703 |
| WP_002280230 | 635 | KRLENYSDLLTKEQVKKLER-RHYTGWGRLSAELIHGIRNK ESRKTILDYLI DDG---NSNRNFMQLINDDAL | 703 |
| WP_002281696 | 635 | KRLENYSDLLTKEQVKKLER-RHYTGWGRLSAELIHGIRNK ESRKTILDYLI DDG---NSNRNFMQLINDDAL | 703 |
| WP_002282247 | 636 | QRLAKYADVFDKKVIDQLAR-RHYTGWGRLSAKLLNGIRDK QSCKTIMDYLI DDA---QSNRNLMQLITDDNL | 704 |
| WP_002282906 | 635 | KRLENYSDLLTKEQVKKLER-RHYTGWGRLSAELIHGIRNK ESRKTILDYLI DDG---NSNRNFMQLINDDAL | 703 |
| WP_002283846 | 635 | KRLKNYSDLLTKEQLKKLER-RHYTGWGRLSAELIHGIRNK ESRKTILDYLI DDG---NSNRNFMQLINDDAL | 703 |
| WP_002287255 | 635 | KRLENYSDLLTKEQVKKLER-RHYTGWGRLSAELIHGIRNK ESRKTILDYLI DDG---NSNRNFMQLINDDAL | 703 |
| WP_002288990 | 635 | KRLKNYSDLLTKEQLKKLER-RHYTGWGRLSAELIHGIRNK ESRKTILDYLI DDG---NSNRNFMQLINDDAL | 703 |
| WP_002289641 | 635 | KRLENYSDLLTKEQVKKLER-RHYTGWGRLSAELIHGIRNK ESRKTILDYLI DDG---NSNRNFMQLINDDAL | 703 |
| WP_002290427 | 635 | KRLKNYSDLLTKEQLKKLER-RHYTGWGRLSAELIHGIRNK ESRKTILDYLI DDG---NSNRNFMQLINDDAL | 703 |
| WP_002295753 | 635 | KRLENYSDLLTKEQVKKLER-RHYTGWGRLSAELIHGIRNK ESRKTILDYLI DDG---NSNRNFMQLINDDAL | 703 |
| WP_002296423 | 635 | KRLKNYSDLLTKEQLKKLER-RHYTGWGRLSAELIHGIRNK ESRKTILDYLI DDG---NSNRNFMQLINDDAL | 703 |
| WP_002304487 | 645 | QRLQKYSDIFTKAQLKKLER-RHYTGWGRLSYKLINGIRDK QSNKTILGYLI DDG---YSNRNFMQLINDDAL | 713 |
| WP_002305844 | 635 | KRLENYSDLLTKEQVKKLER-RHYTGWGRLSAELIHGIRNK ESRKTILDYLI DDG---NSNRNFMQLINDDAL | 703 |
| WP_002307203 | 635 | KRLENYSDLLTKEQVKKLER-RHYTGWGRLSAELIHGIRNK ESRKTLLDYLI DDG---NSNRNFMQLINDDAL | 703 |
| WP_002310390 | 635 | KRLKNYSDLLTKEQLKKLER-RHYTGWGRLSAELIHGIRNK ESRKTILDYLI DDG---NSNRNFMQLINDDAL | 703 |
| WP_002352408 | 635 | KRLENYSDLLTKEQVKKLER-RHYTGWGRLSAELIHGIRNK ESRKTLLDYLI DDG---NSNRNFMQLINDDAL | 703 |
| WP_012997688 | 635 | KRLENYSDLLTKEQVKKLER-RHYTGWGRLSAELIHGIRNK ESRKTILDYLI DDG---NSNRNFMQLINDDAL | 703 |
| WP_014677909 | 635 | KRLKNYSDLLTKEQLKKLER-RHYTGWGRLSAELIHGIRNK ESRKTILDYLI DDG---NSNRNFMQLINDDAL | 703 |
| WP_019312892 | 635 | KRLENYSDLLTKEQVKKLER-RHYTGWGRLSAELIHGIRNK ESRKTILDYLI DDG---NSNRNFMQLINDDAL | 703 |
| WP_019313659 | 635 | KRLENYSDLLTKEQVKKLER-RHYTGWGRLSAELIHGIRNK ESRKTILDYLI DDG---NSNRNFMQLINDDAL | 703 |
| WP_019314093 | 635 | KRLENYSDLLTKEQVKKLER-RHYTGWGRLSAELIHGIRNK ESRKTLLDYLI DDG---NSNRNFMQLINDDAL | 703 |
| WP_019315370 | 635 | KRLENYSDLLTKEQVKKLER-RHYTGWGRLSAELIHGIRNK ESRKTLLDYLI DDG---NSNRNFMQLINDDAL | 703 |
| WP_019803776 | 635 | KRLENYSDLLTKEQVKKLER-RHYTGWGRLSAELIHGIRNK ESRKTILDYLI DDG---NSNRNFMQLINDDAL | 703 |
| WP_019805234 | 635 | KRLKNYSDLLTKEQLKKLER-RHYTGWGRLSAELIHGIRNK ESRKTILDYLI DDG---NSNRNFMQLINDDAL | 703 |
| WP_024783594 | 635 | KRLENYSDLLTKEQVKKLER-RHYTGWGRLSAELIHGIRNK ESRKTILDYLI DDG---NSNRNFMQLINDDAL | 703 |
| WP_024784288 | 636 | QRLAKYADVFDKKVIDQLAR-RHYTGWGRLSAKLLNGIRDK QSCKTIMDYLI DDA---QSNRNLMQLITDDNL | 704 |
| WP_024784666 | 635 | KRLENYSDLLTKEQVKKLER-RHYTGWGRLSAELIHGIRNK ESRKTILDYLI DDG---NSNRNFMQLINDDAL | 703 |
| WP_024784894 | 635 | KRLENYSDLLTKEQVKKLER-RHYTGWGRLSAELIHGIRNK ESRKTILDYLI DDG---NSNRNFMQLINDDAL | 703 |
| WP_024786433 | 636 | QRLAKYADVFDKKVIDQLAR-RHYTGWGRLSAKLLNGIRDK QSCKTIMDYLI DDA---QSNRNLMQLITDDNL | 704 |
| WP_049473442 | 635 | KRLENYSDLLTKEQVKKLER-RHYTGWGRLSAELIHGIRNK ESRKTILDYLI DDG---NSNRNFMQLINDDAL | 703 |
| WP_049474547 | 635 | KRLENYSDLLTKEQVKKLER-RHYTGWGRLSAELIHGIRNK ESRKTILDYLI DDG---NSNRNFMQLINDDAL | 703 |
| EMC03581 | 628 | KRLENYSDLLTKEQVKKLER-RHYTGWGRLSAELIHGIRNK ESRKTILDYLI DDG---NSNRNFMQLINDDAL | 696 |
| WP_000428612 | 636 | QRLAQYDSLFDEKVIKALTR-RHYTGWGKLSSKLINGIRDK QTGKTILDYLM DDG---YNNRNFMQLINDDEL | 704 |
| WP_000428613 | 634 | QRLAQYDSLFDEKVIKALIR-RHYTGWGKLSAKLIDGICDK QTGNTILDYLI DDG---KNNRNFMQLINDDGL | 702 |
| WP_049523028 | 633 | QRLNQYDSIFDEKVIKALTR-RHYTGWGKLSAKLINGIRDK KTSKTILDYLI DDG---YSNRNFMQLINDDGL | 701 |
| WP_003107102 | 603 | KRLSKYESIFDPSILKKLKK-RHYTGWGRLSQKLINGIRDK QTGKTILDFLI -DGq---ANRNFMQLINDPSL | 671 |
| WP_054279288 | 636 | NRLAVYEDLFDQNVLKQLKR-RHYTGWGRLSKQLINGMRDK HTGKTILDFLK -DGf---INRNFMQLINDDNL | 704 |
| WP_049531101 | 634 | QRLAQYASIFDEKVIKTLTR-RHYTGWGKLSAKLINCIRDR KTGKTILDYLI DDG---YNNRNFMQLINDDGL | 702 |
| WP_049538452 | 634 | QRLAQYDSIFDEKVIKALTR-RHYTGWGKLSAKLINGIRDK QTGKTILDYLI DDG---YSNRNFMQLINDDGL | 702 |
| WP_049549711 | 634 | QRLAQYDSLFDKKVIKALTR-RHYTGWGKLSAKLINGICDK QTGNTILDYLI DDG---EINRNFMQLINDDGL | 702 |
| WP_007896501 | 637 | KRLAKYANLFEKSVLKKLRK-RHYRGWGRLSRQLIDGMKDK ASGKTILDFLK -DDf---ANRNFIQLINDSSL | 705 |
| EFR44625 | 589 | KRLAKYANLFEKSVLKKLRK-RHYRGWGRLSRQLIDGMKDK ASGKTILDFLK -DDf---ANRNFIQLINDSSL | 657 |
| WP_002897477 | 633 | QRLAQYDTLFDEKVIKALTR-RHYTGWGKLSAKLINGIRDK QSGKTILDYLI DDD---KINRNFMQLINDDGL | 701 |
| WP_002906454 | 633 | QRLAQYDTLFDEKVIKALTR-RHYTGWGKLSAKLINGIRDK QTGKTILEYLI DDG---DCNRNFMQLINDDGL | 701 |
| WP_009729476 | 634 | QRLAQYDSLFDEKVIKALTR-RHYTGWGKLSAKLINGISDK QTGNTILDYLI DDG---EINRNFMQLINDDGL | 702 |
| CQR24647 | 637 | QRLLKYEDIFSKKVIANLTR-RHYTGWGRLSAKLINGIKDK HSRKTILDYLI DDG---HSNRNFMQLINDDNL | 705 |
| WP_000066813 | 636 | QRLAQYDSLFDEKVIKALTR-RHYTGWGKLSAKLINGIRDK KSGKTILDYLI DDG---EINRNFMQLIHDDGL | 704 |
| WP_009754323 | 634 | QRLAQYDSIFDEKVIKALTR-RHYTGWGKLSAKLINGICDK KTGKTILDYLI DDG---YNNRNFMQLINDDGL | 702 |
| WP_044674937 | 633 | KRLEKYKDILTEEQRKKLER-RHYTGWGRLSAKLINGILDK VTRKTILGYLI DDG---TSNRNFMQLINDDIL | 701 |
| WP_044676715 | 635 | KRLEKYKDVLTEEQRKKLER-RHYTGWGRLSAKLINGIRDK VTRKTILDYLI DDG---TSNRNFMQLINDDIL | 703 |
| WP_044680361 | 635 | KRLEKYKDVLTEEQRKKLER-RHYTGWGRLSAKLINGIRDK VTRKTILDYLI DDG---TSNRNFMQLINDDIL | 703 |
| WP_044681799 | 633 | KRLEKYKDILTEEQRKKLER-RHYTGWGRLSAKLINGILDK VTRKTILGYLI DDG---TSNRNFMQLINDDIL | 701 |
| WP_049533112 | 635 | QRLQKYSDIFTKAQLKKLER-CHYTGWGRLSYKLINGIRNK ENKKTILDYLI DDG---YANRNFMQLINDDAL | 703 |
| WP_029090905 | 613 | RKLSEYPQLTEQQQVQLAQV--RFRGWGRLSQRLINRIKTP EDHKLSINEIL ------QTNENFMQIIRNKDY | 682 |
| WP_006506696 | 638 | RRLKKKYALPDDKVKQILKL--KYKDWSRLSKKLLDGIVAD SV--TVLDVLE -------SRLNLMEIINDKDL | 705 |
| AIT42264 | 634 | ERLKTYAHLFDDKVMKQLKR-RRYTGWGRLSRKLINGIRDK QSGKTILDFLK -DGf---ANRNFMQLIHDDSL | 702 |
| WP_034440723 | 638 | RQLMKFKDKLSEKAINQLSK-KHYTGWGQLSEKLINGIRDE QSNKTILDYLI DNGcpkNMNRNFMQLINDDIL | 710 |
| AKQ21048 | 634 | ERLKTYAHLFDDKVMKQLKR-RRYTGWGRLSRKLINGIRDK QSGKTILDFLK -DGf---ANRNFMQLIHDDSL | 702 |
| WP_004636532 | 634 | KQLQTYSDTLSPEILKKLER-KHYTGWGRFSKKLINGLRDE GSNKTILDYLK DEGssgPINRNFMQLIRDNIL | 706 |
| WP_002364836 | 642 | TQLSTFKGQFSAEVLKKLER-KHYTGWGRLSKKLINGIYDK ESGKTILGYLI DDGvskHYNRNFMQLINDSQL | 714 |
| WP_016631044 | 593 | TQLSTFKGQFSAEVLKKLER-KHYTGWGRLSKKLINGIYDK ESGKTILDYLV DDGvskHYNRNFMQLINDSQL | 665 |
| EMS75795 | 382 | TQLKKYQSVLGDGFFKKLVK-KHYTGWGRLSERLINGIRDK KTNKTILDYLI DDDfpyNRNRNFMQLINDDSL | 454 |
| WP_002373311 | 642 | TQLSTFKGQFSAEVLKKLER-KHYTGWGRLSKKLINGIYDK ESGKTILDYLV DDGvskHYNRNFMQLINDSQL | 714 |
| WP_002378009 | 642 | TQLSTFKGQFSAEVLKKLER-KHYTGWGRLSKKLINGIYDK ESGKTILDYLI DDGvskHYNRNFMQLINDSQL | 714 |
| WP_002407324 | 642 | TQLSTFKGQFSAEVLKKLER-KHYTGWGRLSKKLINGIYDK ESGKTILDYLV DDGvskHYNRNFMQLINDSQL | 714 |
| WP_002413717 | 642 | TQLSTFKGQFSAEVLKKLER-KHYTGWGRLSKKLINGIYDK ESGKTILDYLV DDGvskHYNRNFMQLINDSQL | 714 |
| WP_010775580 | 644 | TQLSTFKGQFSEEVLKKLER-KHYTGWGRLSKKLINGIYDK ESGKTILDYLI DDGvskHYNRNFMQLINDSQL | 716 |
| WP_010818269 | 642 | TQLSTFKGQFSAEVLKKLER-KHYTGWGRLSKKLINGIYDK ESGKTILGYLI DDGvskHYNRNFMQLINDSQL | 714 |
| WP_010824395 | 642 | TQLSTFKGQFSAEVLKKLER-KHYTGWGRLSKKLINGIYDK ESGKTILDYLI DDGvskHYNRNFMQLINDSQL | 714 |
| WP_016622645 | 642 | TQLSTFKGQFSAEVLKKLER-KHYTGWGRLSKKLINGIYDK ESGKTILDYLV DDGvskHYNRNFMQLINDSQL | 714 |
| WP_033624816 | 642 | TQLSTFKGQFSAEVLKKLER-KHYTGWGRLSKKLINGIYDK ESGKTILDYLI DDGvskHYNRNFMQLINDSQL | 714 |
| WP_033625576 | 642 | TQLSTFKGQFSAEVLKKLER-KHYTGWGRLSKKLINGIYDK ESGKTILDYLI DDGvskHYNRNFMQLINDSQL | 714 |
| WP_033789179 | 642 | TQLSTFKGQFSEEVLKKLER-KHYTGWGRLSKKLINGIYDK ESGKTILDYLI DDGvskHYNRNFMQLINDSQL | 714 |
| WP_002310644 | 642 | TRLSHHEATLGKHIIKKLIK-KHYTGWGRLSKELIQGIRDK QSNKTILDYLI DDDfphHRNRNFMQLINDDSL | 714 |
| WP_002312694 | 643 | TRLSHHEATLGKHIIKKLIK-KHYTGWGRLSKELIQGIRDK QSNKTILDYLI DDDfphHRNRNFMQLINDDSL | 715 |
| WP_002314015 | 643 | TRLSHHEATLGKHIIKKLIK-KHYTGWGRLSKELIQGIRDK QSNKTILDYLI DDDfphHRNRNFMQLINDDSL | 715 |
| WP_002320716 | 643 | TRLSHHEATLGKHIIKKLIK-KHYTGWGRLSKELIQGIRDK QSNKTILDYLI DDDfphHRNRNFMQLINDDSL | 715 |
| WP_002330729 | 642 | TRLSHHEATLGKHIIKKLIK-KHYTGWGRLSKELIQGIRDK QSNKTILDYLI DDDfphHRNRNFMQLINDDSL | 714 |
| WP_002335161 | 643 | TRLSHHEATLGKHIIKKLIK-KHYTGWGRLSKELIQGIRDK QSNKTILDYLI DDDfphHRNRNFMQLINDDSL | 715 |
| WP_002345439 | 643 | TRLSHHEATLGKHIIKKLIK-KHYTGWGRLSKELIQGIRDK QSNKTILDYLI DDDfphHRNRNCMQLINDDSL | 715 |
| WP_034867970 | 638 | HQLSKYQEVFGEKLLKEFAR-KHYTGWGRFSAKLIHGIRDR KTNKTILDYLI DDDvpaNRNRNLMQLINDEHL | 710 |
| WP_047937432 | 643 | TRLSHHEATLGKHIIKKLIK-KHYTGWGRLSKELIQGIRDK QSNKTILDYLI DDDfphHRNRNFMQLINDDSL | 715 |
| WP_010720994 | 638 | HQLSKYQEVFGEKLLKEFAR-KHYTGWGRFSAKLIHGIRDR KTNKTILDYLI DDDvpaNRNRNLMQLINDEHL | 710 |
| WP_010737004 | 638 | HQLSKYQEVFGEKLLKEFAR-KHYTGWGRFSAKLIHGIRDR KTNKTILDYLI DDDvpaNRNRNLMQLINDEHL | 710 |
| WP_034700478 | 638 | HQLSKYQEVFGEKLLKEFAR-KHYTGWGRFSAKLIHGIRDR KTNKTILDYLI DDDvpaNRNRNLMQLINDEHL | 710 |
| WP_007209003 | 635 | NQLEQLPLNLSTKTIKALSR-RKYTGWGRLSARLIDGIHDK NSGKTILDYLI DESdsyIVNRNFMQLINDDHL | 707 |
| WP_023519017 | 632 | EQLKPYETVLGLPAIKKLAK-KHYTGWGRLSEKMIQGMREK QSRKTILDYLI DDDfpcNRNRNFMQLINDDHL | 704 |
| WP_010770040 | 635 | EQLKKYTYLFDEEVLKKLER-RHYTGWGRLSAKLLIGIKEK RTHKTILDYLI DDGgkqPINRNLMQLINDSDL | 707 |
| WP_048604708 | 631 | EQLSKFSDRLSEKTIKDLER-RHYTGWGRLSAKLINGIHDK QSNKTILDYLI DDApkkNINRNFMQLINDNRL | 703 |
| WP_010750235 | 637 | TQLKKYQRILGEEIFKKLVK-KKYTGWGRLSKRLINGIRDQ KTNKTILDYLI DDDfpyNRNRNFMQLINDDHL | 709 |
| AII16583 | 673 | ERLKTYAHLFDDKVMKQLKR-RRYTGWGRLSRKLINGIRDK QSGKTILDFLK -DGf---ANRNFMQLIHDDSL | 741 |
| WP_029073316 | 648 | RRLKKEYDLDEEKIKKILKL--KYSGWSRLSKKLLSGIKTK RTPETVLEVME -------TNMNLMQVINDEKL | 717 |
| WP_031589969 | 648 | RRLKKEYDLDEEKIKKILKL--KYSGWSRLSKKLLSGIKTK RTPETVLEVME -------TNMNLMQVINDEKL | 717 |
| KDA45870 | 631 | RRLENYRDFLGEDILRKLSR-KKYTGWGRLSAKLLDGIYDK KTHKTILDCLM EDYs-----QNFMQLINDDTY | 698 |
| WP_039099354 | 651 | AKLNEIDWLIDQQRVQLAAK--RYRGWGRLSAKLLTQIVN- ANGQRIMDLLW -------TTDNFMRIVHSE-- | 712 |
| AKP02966 | 633 | EKLHSSNYSYTSDQIKKISN-MRYKGWGRLSKKILICITTE TNTPKSLQLSN -DLm-wITNNNFISIISNDKY | 706 |
| WP_010991369 | 638 | EQLQQFSDVLDGVVLKKLER-RHYTGWGRLSAKLLMGIRDK QSHLTILDYLM DDG----LNRNLMQLINDSNL | 706 |
| WP_033838504 | 638 | EQLQQFSDVLDGVVLKKLER-RHYTGWGRLSAKLLMGIRDK QSHLTILDYLM DDG----LNRNLMQLINDSNL | 706 |
| EHN60060 | 641 | EQLQQFSDVLDGVVLKKLER-RHYTGWGRLSAKLLMGIRDK QSHLTILDYLM DDG----LNRNLMQLINDSNL | 709 |
| EFR89594 | 407 | EQLQQFSDVLDGVVLKKLER-RHYTGWGRLSAKLLMGIRDK QSHLTILDYLM DDG----LNRNLMQLINDSNL | 475 |
| WP_038409211 | 638 | EQLQSFSDVLDGTILKKLER-RHYTGWGRLSAKLLTGIRDK HSHLTILDYLM DDG----LNRNLMQLINDSNL | 706 |
| EFR95520 | 257 | EQLQSFSDVLDGTILKKLER-RHYTGWGRLSAKLLTGIRDK HSHLTILDYLM DDG----LNRNLMQLINDSNL | 325 |
| WP_003723650 | 638 | EQLQQFSDVLDGGVLKKLER-RHYTGWGRLSAKLLVGIREK QSHLTILDYLM DDG----LNRNLMQLINDSNL | 706 |
| WP_003727705 | 638 | EQLEQFSDVLDGVVLKKLER-RHYTGWGRLSAKLLVGIRDK QSHLTILDYLM DDG----LNRNLMQLINDSNL | 706 |
| WP_003730785 | 638 | EQLEQFSDVLDGVVLKKLER-RHYTGWGRLSAKLLVGIRDK QSHLTILDYLM DDG----LNRNLMQLINDSNL | 706 |
| WP_003733029 | 638 | EQLQQFSDVLDGTVLKKLER-RHYTGWGRLSAKLLVGIRDK QSHLTILDYLM DDG----LNRNLMQLINDSNL | 706 |
| WP_003739838 | 638 | EQLQQFSDVLDGAVLKKLER-RHYTGWGRLSAKLLVGIRDK QSHLTILDYLM DDG----LNRNLMQLINDSNL | 706 |
| WP_014601172 | 638 | EQLQQFSDVLDGGVLKKLER-RHYTGWGRLSAKLLVGIREK QSHLTILDYLM DDG----LNRNLMQLINDSNL | 706 |
| WP_023548323 | 638 | EQLQQFSDVLDGTVLKKLER-RHYTGWGRLSAKLLVGIRDK QSHLTILDYLM DDG----LNRNLMQLINDSNL | 706 |
| WP_031665337 | 638 | EQLQQFSDVLDGVVLKKLER-RHYTGWGRLSAKLLVGIRDK QSHLTILEYLM DDG----LNRNLMQLINDSNL | 706 |
| WP_031669209 | 638 | EQLQQFSDVLDGTVLKKLER-RHYTGWGRLSAKLLVGIRDK QSHLTILDYLM DDG----LNRNLMQLINDSNL | 706 |
| WP_033920898 | 638 | EQLQQFSDVLDGTVLKKLER-RHYTGWGRLSAKLLVGIRDK QSHLTILDYLM DDG----LNRNLMQLINDSNL | 706 |
| AKI42028 | 641 | EQLQQFSDVLDGGVLKKLER-RHYTGWGRLSAKLLVGIREK QSHLTILDYLM DDG----LNRNLMQLINDSNL | 709 |
| AKI50529 | 641 | EQLQQFSDVLDGTVLKKLER-RHYTGWGRLSAKLLVGIRDK QSHLTILDYLM DDG----LNRNLMQLINDSNL | 709 |
| EFR83390 | 86 | EQLQQFSDVLDGVVLKKLER-RHYTGWGRLSAKLLVGIRDK QSHLTILEYLM DDG----LNRNLMQLINDSNL | 154 |
| WP_046323366 | 638 | ERLQEFSNVLDEAVLKKLER-RHYTGWGRLSAKLLIGIRDK ESHLTILDYLM DDK----HNRNLMQLINDSNL | 706 |
| AKE81011 | 650 | ERLKTYAHLFDDKVMKQLKR-RRYTGWGRLSRKLINGIRDK QSGKTILDFLK -DGf---ANRNFMQLIHDDSL | 718 |
| CUO82355 | 642 | RRLKKKYALPDDKIKQILKL--KYKDWSRLSKKLLDGIVAD SV--TVLDVLE -------SRLNLMEIINDKEL | 709 |
| WP_033162887 | 645 | RRLKKVYQLDDLLVDKILKL--NYTGWSRLSEKLLTGMTAD KA--TVLFVLE -------SNKNLMEIINDEKL | 712 |
| AGZ01981 | 667 | ERLKTYAHLFDDKVMKQLKR-RRYTGWGRLSRKLINGIRDK QSGKTILDFLK -DGf---ANRNFMQLIHDDSL | 735 |
| AKA60242 | 634 | ERLKTYAHLFDDKVMKQLKR-RRYTGWGRLSRKLINGIRDK QSGKTILDFLK -DGf---ANRNFMQLIHDDSL | 702 |
| AKS40380 | 634 | ERLKTYAHLFDDKVMKQLKR-RRYTGWGRLSRKLINGIRDK QSGKTILDFLK -DGf---ANRNFMQLIHDDSL | 702 |
| 4UN5_B | 638 | ERLKTYAHLFDDKVMKQLKR-RRYTGWGRLSRKLINGIRDK QSGKTILDFLK -DGf---ANRNFMQLIHDDSL | 706 |
| WP_010922251 | 703 | [chemical structure] | 777 |
| WP_039695303 | 707 | PFKQIIQKSQVVG-DVDD-IEAVVHDLPGSPAIKKGILQSVKIVDELVKVMG-GNPDNIVIEMARENQ TTNRGRSQS | 780 |
| WP_045635197 | 702 | SFKEIIQKAQVIG-KTDD-VKQVVQELSGSPAIKKGILQSIKIVDELVKVMG-HAPESIVIEMARENQ TTARGKKNS | 775 |
| 5AXW_A | 427 | VPKKVDLSQQKEI---PT---TLVDDFILSPVVKRSFIQSIKVINAIIKKYG--LPNDIIIELAREKN --------S | 487 |
| WP_009880683 | 387 | TFKEDLQKAQVSG-QGDS-LHEHIANLAGSPAIKKGILQTVKVVDELVKVMGrHKPENIVIEMARENQ TTQKGQKNS | 461 |
| WP_010922251 | 703 | TFKEDIQKAQVSG-QGDS-LHEHIANLAGSPAIKKGILQTVKVVDELVKVMGrHKPENIVIEMARENQ TTQKGQKNS | 777 |
| WP_011054416 | 703 | TFKEDIQKAQVSG-QGDS-LHEHIANLAGSPAIKKGILQTVKVVDELVKVMGrHKPENIVIEMARENQ TTQKGQKNS | 777 |
| WP_011284745 | 703 | TFKEDIQKAQVSG-QGDS-LHEHIANLAGSPAIKKGILQTVKVVDELVKVMGrHKPENIVIEMARENQ TTQKGQKNS | 777 |
| WP_011285506 | 703 | TFKEDIQKAQVSG-QGDS-LHEHIANLAGSPAIKKGILQTVKVVDELVKVMGrHKPENIVIEMARENQ TTQKGQKNS | 777 |
| WP_011527619 | 703 | TFKEDIQKAQVSG-QGDS-LHEHIANLAGSPAIKKGILQTVKVVDELVKVMGrHKPENIVIEMARENQ TTQKGQKNS | 777 |
| WP_012560673 | 703 | TFKEDLQKAQVSG-QGDS-LHEHIANLAGSPAIKKGILQTVKVVDELVKVMGrHKPENIVIEMARENQ TTQKGQKNS | 777 |
| WP_014407541 | 703 | TFKEDIQKAQVSG-QGHS-LHEQIANLAGSPAIKKGILQTVKIVDELVKVMG-HKPENIVIEMARENQ TTQKGQKNS | 776 |
| WP_020905136 | 703 | TFKEDIQKAQVSG-QGDS-LHEHIANLAGSPAIKKGILQTVKVVDELVKVMGrHKPENIVIEMARENQ TTQKGQKNS | 777 |
| WP_023080005 | 703 | TFKEAIQKAQVSG-QGHS-LHEQIANLAGSPAIKKGILQTVKIVDELVKVMG-HKPENIVIEMARENQ TTQKGQKNS | 776 |
| WP_023610282 | 703 | TFKEAIQKAQVSG-QGHS-LHEQIANLAGSPAIKKGILQTVKIVDELVKVMG-HKPENIVIEMARENQ TTQKGQKNS | 776 |
| WP_030125963 | 703 | TFKEDLQKAQVSG-QGDS-LHEHIANLAGSPAIKKGILQTVKVVDELVKVMGrHKPENIVIEMARENQ TTQKGQKNS | 777 |
| WP_030126706 | 703 | TFKEDIQKAQVSG-QGDS-LHEHIANLAGSPAIKKGILQTVKVVDELVKVMGrHKPENIVIEMARENQ TTQKGQKNS | 777 |
| WP_031488318 | 703 | TFKEDIQKAQVSG-QGDS-LHEHIANLAGSPAIKKGILQTVKVVDELVKVMGrHKPENIVIEMARENQ TTQKGQKNS | 777 |
| WP_032460140 | 703 | TFKEDLQKAQVSG-QGDS-LHEHIANLAGSPAIKKGILQTVKVVDELVKVMGrHKPENIVIEMARENQ TTQKGQKNS | 777 |
| WP_032461047 | 703 | TFKEDLQKAQVSG-QGDS-LHEHIANLAGSPAIKKGILQTVKVVDELVKVMGrHKPENIVIEMARENQ TTQKGQKNS | 777 |
| WP_032462016 | 703 | TFKEDIQKAQVSG-QGDS-LHEHIANLAGSPAIKKGILQTVKVVDELVKVMGrHKPENIVIEMARENQ TTQKGQKNS | 777 |
| WP_032462936 | 703 | TFKEDIQKAQVSG-QGDS-LHEHIANLAGSPAIKKGILQTVKVVDELVKVMGrHKPENIVIEMARENQ TTQKGQKNS | 777 |
| WP_032464890 | 703 | TFKEDIQKAQVSG-QGDS-LHEHIANLAGSPAIKKGILQTVKVVDELVKVMGrHKPENIVIEMARENQ TTQKGQKNS | 777 |
| WP_033888930 | 528 | TFKEDIQKAQVSG-QGDS-LHEHIANLAGSPAIKKGILQTVKVVDELVKVMGrHKPENIVIEMARENQ TTQKGQKNS | 602 |
| WP_038431314 | 703 | TFKEDIQKAQVSG-QGDS-LHEHIANLAGSPAIKKGILQTVKVVDELVKVMGrHKPENIVIEMARENQ TTQKGQKNS | 777 |
| WP_038432938 | 703 | TFKEAIQKAQVSG-QGHS-LHEQIANLAGSPAIKKGILQTVKIVDELVKVMG-HKPENIVIEMARENQ TTQKGQKNS | 776 |
| WP_038434062 | 703 | TFKEDIQKAQVSG-QGDS-LHEHIANLAGSPAIKKGILQTVKIVDELVKVMGrHKPENIVIEMARENQ TTQKGQKNS | 777 |
| BAQ51233 | 614 | TFKEDIQKAQVSG-QGDS-LHEHIANLAGSPAIKKGILQTVKVVDELVKVMGrHKPENIVIEMARENQ TTQKGQKNS | 688 |
| KGE60162 | | -------------------------------------------------------------------- --------- | |
| KGE60856 | | -------------------------------------------------------------------- --------- | |
| WP_002989955 | 703 | TFKEDIQKAQVSG-QGDS-LHEHIANLAGSPAIKKGILQTVKVVDELVKVMGrHKPENIVIEMARENQ TTQKGQKNS | 777 |
| WP_003030002 | 704 | SEKEEIARAQIIG-DVDD-IANVVHDLPGSPAIKKGILQSVKIVDELVKVMG-HNPANIIIEMARENQ MTDKGRRNS | 777 |
| WP_003065552 | 707 | PFKQIIQKSQVVG-DVDD-IEAVVHDLPGSPAIKKGILQSVKIVDELVKVMG-DNPDNIVIEMARENQ TTNRGRSQS | 780 |
| WP_001040076 | 702 | SFKPIIDKARTGS-HSDN-LKEVIGELAGSPAIKKGILQSLKIVDELVKVMG-YEPEQIVVEMARENQ TTAKGLSRS | 775 |
| WP_001040078 | 705 | SFKSIISKAQAGS-HSDN-LKEVVGELAGSPAIKKGILQSLKIVDELVKVMG-YEPEQIVVEMARENQ TTNQGRRNS | 778 |
| WP_001040080 | 705 | SFKSIISKAQAGS-HSDN-LKEVVGELAGSPAIKKGILQSLKIVDELVKVMG-YEPEQIVVEMARENQ TTNQGRRNS | 778 |
| WP_001040081 | 705 | SFKSIISKAQAGS-HSDN-LKEVVGELAGSPAIKKGILQSLKIVDELVKVMG-YEPEQIVVEMARENQ TTNQGRRNS | 778 |
| WP_001040083 | 705 | SFKSIISKAQAGS-HSDN-LKEVVGELAGSPAIKKGILQSLKIVDELVKVMG-YEPEQIVVEMARENQ TTNQGRRNS | 778 |
| WP_001040085 | 705 | SFKSIISKAQAGS-HSDN-LKEVVGELAGSPAIKKGILQSLKIVDELVKVMG-YEPEQIVVEMARENQ TTNQGRRNS | 778 |
| WP_001040087 | 705 | SFKSIISKAQAGS-HSDN-LKEVVGELAGSPAIKKGILQSLKIVDELVKVMG-YEPEQIVVEMARENQ TTNQGRRNS | 778 |
| WP_001040088 | 705 | SFKSIISKAQAGS-HSDN-LKEVVGELAGSPAIKKGILQSLKIVDELVKVMG-YEPEQIVVEMARENQ TTNQGRRNS | 778 |
| WP_001040089 | 705 | SFKSIISKAQAGS-HSDN-LKEVVGELAGSPAIKKGILQSLKIVDELVKVMG-YEPEQIVVEMARENQ TTNQGRRNS | 778 |
| WP_001040090 | 705 | SFKSIISKAQAGS-HSDN-LKEVVGELAGSPAIKKGILQSLKIVDELVKVVG-YEPEQIVVEMARENQ TTNQGRRNS | 778 |
| WP_001040091 | 705 | SFKSIISKAQAGS-HSDN-LKEVVGELAGSPAIKKGILQSLKIVDELVKVMG-YEPEQIVVEMARENQ TTNQGRRNS | 778 |
| WP_001040092 | 705 | SFKSIISKAQSGS-HSDN-LKEVVGELAGSPAIKKGILQSLKIVDELVKVMG-YEPEQIVVEMARENQ TTNQGRRNS | 778 |
| WP_001040094 | 702 | SFKPIIDKARTGS-HSDN-LKEVVGELAGSPAIKKGILQSLKIVDELVKVMG-YEPEQIVVEMARENQ TTAKGLSRS | 775 |
| WP_001040095 | 702 | SFKPIIDKARTGS-HLDN-LKEVVGELAGSPAIKKGILQSLKIVDELVKVMG-YEPEQIVVEMARENQ TTAKGLSRS | 775 |
| WP_001040096 | 702 | SFKPIIDKARTGS-HLDN-LKEVVGELAGSPAIKKGILQSLKIVDELVKVMG-YEPEQIVVEMARENQ TTAKGLSRS | 775 |
| WP_001040097 | 702 | SFKPIIDKARTGS-HSDN-LKEVVGELAGSPAIKKGILQSLKIVDELVKVMG-YEPEQIVVEMARENQ TTAKGLSRL | 775 |
| WP_001040098 | 702 | SFKPIIDKARTGS-HSDN-LKEVVGELAGSPAIKKGILQSLKIVDELVKVMG-YEPEQIVVEMARENQ TTAKGLSRS | 775 |
| WP_001040099 | 702 | SFKPIIDKARTGS-HSDN-LKEVVGELAGSPAIKKGILQSLKIVDELVKVMG-YEPEQIVVEMARENQ TTAKGLSRS | 775 |
| WP_001040100 | 702 | SFKPIIDKARTGS-HSDN-LKEVVGELAGSPAIKKGILQSLKIVDELVKVMG-YEPEQIVVEMARENQ TTAKGLSRS | 775 |
| WP_001040104 | 705 | SFKSIISKAQAGS-HSDN-LKEVVGELAGSPAIKKGILQSLKIVDELVKVMG-YEPEQIVVEMARENQ TTNQGRRNS | 778 |
| WP_001040105 | 705 | SFKSIISKAQAGS-HSDN-LKEVVGELAGSPAIKKGILQSLKIVDELVKVMG-YEPEQIVVEMARENQ TTNQGRRNS | 778 |
| WP_001040106 | 705 | SFKPIIDKAQAGS-HSDN-LKEVVGELAGSPAIKKGILQSLKIVDELVKVMG-YEPEQVVVEMARENQ TTNQGRRNT | 778 |
| WP_001040107 | 705 | SFKPIIDKAQAGS-HSDN-LKEVVGELAGSPAIKKGILQSLKIVDELVKVMG-YEPEQVVVEMARENQ TTNQGRRNT | 778 |
| WP_001040108 | 705 | SFKPIIDKAQAGS-HSDN-LKEVVGELAGSPAIKKGILQSLKIVDELVKVMG-YEPEQVVVEMARENQ TTNQGRRNT | 778 |
| WP_001040109 | 705 | SFKPIIDKAQAGS-HSDN-LKEVVGELAGSPAIKKGILQSLKIVDELVKVMG-YEPEQVVVEMARENQ TTNQGRRNT | 778 |
| WP_001040110 | 705 | SFKPIIDKAQAGS-HSDN-LKEVVGELAGSPAIKKGILQSLKIVDELVKVMG-YEPEQVVVEMARENQ TTNQGRRNT | 778 |
| WP_015058523 | 705 | SFKSIISKAQSGS-HSDN-LKEVVGELAGSPAIKKGILQSLKIVDELVKVMG-YEPEQIVVEMARENQ TTNQGRRNS | 778 |
| WP_017643650 | 702 | SFKPIIDKARTGS-HSDN-LKEVVGELAGSPAIKKGILQSLKIVDELVKVMG-YEPEQIVVEMARENQ TTAKGLSRL | 775 |
| WP_017647151 | 705 | SFKSIISKAQAGS-HSDN-LKEVVGELAGSPAIKKGILQSLKIVDELVKVMG-YEPEQIVVEMARENQ TTNQGRRNS | 778 |
| WP_017648376 | 705 | SFKSIISKAQAGS-HSDN-LKEVVGELAGSPAIKKGILQSLKIVDELVKVMG-YEPEQIVVEMARENQ TTNQGRRNS | 778 |
| WP_017649527 | 705 | SFKSIISKAQAGS-HSDN-LKEVVGELAGSPAIKKGILQSLKIVDELVKVMG-YEPEQIVVEMARENQ TTNQGRRNS | 778 |
| WP_017771611 | 705 | SFKPIIDKAQAGS-HSDN-LKEVVGELAGSPAIKKGILQSLKIVDELVKVMG-YEPEQVVVEMARENQ TTNQGRRNT | 778 |
| WP_017771984 | 705 | SFKSIISKAQAGS-HSDN-LKEVVGELAGSPAIKKGILQSLKIVDELVKVMG-YEPEQIVVEMARENQ TTNQGRRNS | 778 |
| CFQ25032 | 705 | SFKSIISKAQAGS-HSDN-LKEVVGELAGSPAIKKGILQSLKIVDELVKVMG-YEPEQIVVEMARENQ TTNQGRRNS | 778 |
| CFV16040 | 705 | SFKSIISKAQAGS-HSDN-LKEVVGELAGSPAIKKGILQSLKIVDELVKVMG-YEPEQIVVEMARENQ TTNQGRRNS | 778 |
| KLJ37842 | 705 | SFKSIISKAQAGS-HSDN-LKEVVGELAGSPAIKKGILQSLKIVDELVKVMG-YEPEQIVVEMARENQ TTNQGRRNS | 778 |
| KLJ72361 | 705 | SFKSIISKAQAGS-HSDN-LKEVVGELAGSPAIKKGILQSLKIVDELVKVMG-YEPEQIVVEMARENQ TTNQGRRNS | 778 |
| KLL20707 | 719 | SFKSIISKAQAGS-HSDN-LKEVVGELAGSPAIKKGILQSLKIVDELVKVMG-YEPEQIVVEMARENQ TTNQGRRNS | 792 |
| KLL42645 | 705 | SFKPIIDKAQAGS-HSDN-LKEVVGELAGSPAIKKGILQSLKIVDELVKVMG-YEPEQVVVEMARENQ TTNKGRRNT | 778 |
| WP_047207273 | 705 | SFKSIISKAQAGS-HSDN-LKEVVGELAGSPAIKKGILQSLKIVDELVKVMG-YEPEQIVVEMARENQ TTNQGRRNS | 778 |
| WP_047209694 | 702 | SFKPIIDKARTGS-HSDN-LKEVVGELAGSPAIKKGILQSLKIVDELVKVMG-YEPEQIVVEMARENQ TTAKGLSRS | 775 |
| WP_050198062 | 705 | SFKSIISKAQAGS-HSDN-LKEVVGELAGSPAIKKGILQSLKIVDELVKVMG-YEPEQIVVEMARENQ TTNQGRRNS | 778 |
| WP_050201642 | 705 | SFKSIISKAQAGS-HSDN-LKEVVGELAGSPAIKKGILQSLKIVDELVKVMG-YEPEQIVVEMARENQ TTNQGRRNS | 778 |
| WP_050204027 | 705 | SFKPIIDKAQAGS-HSDN-LKEVVGELAGSPAIKKGILQSLKIVDELVKVMG-YEPEQVVVEMARENQ TTNQGRRNT | 778 |
| WP_050881965 | 705 | SFKSIISKAQAGS-HSDN-LKEVVGELAGSPAIKKGILQSLKIVDELVKVMG-YEPEQIVVEMARENQ TTNQGRRNS | 778 |
| WP_050886065 | 705 | SFKSIISKAQAGS-HSDN-LKEVVGELAGSPAIKKGILQSLKIVDELVKVMG-YEPEQIVVEMARENQ TTNQGRRNS | 778 |
| AHN30376 | 705 | SFKSIISKAQSGS-HSDN-LKEVVGELAGSPAIKKGILQSLKIVDELVKVMG-YEPEQIVVEMARENQ TTNQGRRNS | 778 |
| EAO78426 | 705 | SFKSIISKAQAGS-HSDN-LKEVVGELAGSPAIKKGILQSLKIVDELVKVMG-YEPEQIVVEMARENQ TTNQGRRNS | 778 |
| CCW42055 | 705 | SFKSIISKAQSGS-HSDN-LKEVVSELAGSPAIKKGILQSLKIVDELVKVMG-YKPEQIVVEMARENQ TTNQGRRNS | 778 |
| WP_003041502 | 704 | SFKEEIAKAQIIG-DVDD-IANVVHDLPGSPAIKKGILQSVKIVDELVKVMG-HNPANIIIEMARENQ TTDRGRRNS | 777 |
| WP_037593752 | 705 | SEKEEIARAQIIG-DVDD-IANVVHDLPGSPAIKKGILQSVKIVDELVKVMG-HNPANIIIEMARENQ TTDKGRRNS | 778 |
| WP_049516684 | 705 | SEKEEIARAQIIG-DVDD-IANVVHDLPGSPAIKKGILQSVKIVDELVKVMG-HNPANIIIEMARENQ TTDKGRRNS | 778 |
| GAD46167 | 704 | SEKEEIARAQIIG-DVDD-IANVVHDLPGSPAIKKGILQSVKIVDELVKVMG-HNPANIIIEMARENQ TTDKGRRNS | 777 |
| WP_018363470 | 705 | SFKQIIQEAQVVG-DVDD-IETVVHDLPGSPAIKKGILQSVKIVDELIKVMG-DNPDNIVIEMARENQ TTNRGRSQS | 778 |
| WP_003043819 | 713 | TFKEEIEKAQVSG-QGDS-LHEQIADLAGSPAIKKGILQTVKIVDELVKVMG-HKPENIVIEMARENQ TTTKGLQQS | 786 |
| WP_006269658 | 704 | SEKEEIARAQIID-DVDD-IANVVHDLPGSPAIKKGILQSVKIVDELVKVMG-HNPANIIIEMARENQ TTDKGRRNS | 777 |
| WP_048800889 | 704 | PFKQIIKDAQAID-DVDD-IELIVHDLPGSPAIKKGILQSIKIVDELVKVMG-YNPDNIVIEMARENQ TTTKGRRNS | 777 |
| WP_012767106 | 703 | TFKEAIQKAQVSG-QGHS-LHEQIANLAGSPAIKKGILQSVKVVDELVKVMG-HKPENIVIEMARENQ TTQKGQKNS | 776 |
| WP_014612333 | 703 | TFKEAIQKAQVSG-QGHS-LHEQIANLAGSPAIKKGILQSVKVVDELVKVMG-HKPENIVIEMARENQ TTQKGQKNS | 776 |
| WP_015017095 | 703 | TFKEAIQKAQVSG-QGHS-LHEQIANLAGSPAIKKGILQSVKVVDELVKVMG-HKPENIVIEMARENQ TTQKGQKNS | 776 |
| WP_015057649 | 703 | TFKEAIQKAQVSG-QGHS-LHEQIANLAGSPAIKKGILQSVKVVDELVKVMG-HKPENIVIEMARENQ TTQKGQKNS | 776 |
| WP_048327215 | 703 | TFKEAIQKAQVSG-QGHS-LHEQIANLAGSPAIKKGILQSVKVVDELVKVMG-HKPENIVIEMARENQ TTQKGQKNS | 776 |
| WP_049519324 | 703 | TFKEAIQKAQVSG-QGHS-LHEQIANLAGSPAIKKGILQSVKVVDELVKVMG-HKPENIVIEMARENQ TTQKGQKNS | 776 |
| WP_012515931 | 703 | SFIDEIAKAQVIG-KTEY-SKDLVGNLAGSPAIKKGISQTIKIVDELVKIMG-YLPQQIVIEMARENQ TTAQGIKNA | 776 |
| WP_021320964 | 703 | SFIDEIAKAQVIG-KTEY-SKDLVGNLASSPAIKKGISQTIKIVDELVKIMG-YLPQQIVIEMARENQ TTAQGIKNA | 776 |
| WP_037581760 | 703 | SFIDEIAKAQVIG-KTEY-SKDLVGNLAGSPAIKKGISQTIKIVDELVKIMG-YLPQQIVIEMARENQ TTAQGIKNA | 776 |
| WP_004232481 | 704 | SFKITIQEAQVVG-DVDD-IEAVVHDLPGSPAIKKGILQSVKIVDELVKVMG-HNPQNIVIEMARENQ ITGYGRNRS | 777 |
| WP_009854540 | 705 | PFKQIIQKSQVVG-DVDD-IEAVVHDLPGSPAIKKGILQSVKIVDELVKVMG-DNPDNIVIEMARENQ TTNRGRSQS | 778 |
| WP_012962174 | 705 | PFKQIIKDAQIIG-DIDD-VISVVRELPGSPAIKKGILQSVKIVDELVKVMG-HNPDNIVIEMARENQ TTNRGRNQS | 778 |
| WP_039695303 | 707 | PFKQIIQKSQVVG-DVDD-IEAVVHDLPGSPAIKKGILQSVKIVDELVKVMG-GNPDNIVIEMARENQ TTNRGRSQS | 780 |
| WP_014334983 | 704 | SFKIIIQEAQVVG-DVDD-IEAVVHDLPGSPAIKKGILQSVKIVDELVKVMG-DNPDNIVIEMARENQ TTGYGRNKS | 777 |
| WP_003099269 | 703 | DFAKIIKNEQEKTiKNES-LEETIANLAGSPAIKKGILQSIKIVDEIVKIMG-QNPDNIVIEMARENQ STMQGIKNS | 777 |
| AHY15608 | 703 | DFAKIIKNEQEKTiKNES-LEETIANLAGSPAIKKGILQSIKIVDEIVKIMG-QNPDNIVIEMARENQ STMQGIKNS | 777 |
| AHY17476 | 703 | DFAKIIKNEQEKTiKNES-LEETIANLAGSPAIKKGILQSIKIVDEIVKIMG-QNPDNIVIEMARENQ STMQGIKNS | 777 |
| ESR09100 | | -------------------------------------------------------------------- --------- | |
| AGM98575 | 703 | DFAKIIKNEQEKTiKNES-LEETIANLAGSPAIKKGILQSIKIVDEIVKIMG-QNPDNIVIEMARENQ STMQGIKNS | 777 |
| ALF27331 | 704 | SFKEEIAKAQVIG-EIDN-LNQVVSDIAGSPAIKKGILQSLKIVDELVKIMG-HQPENIVVEMARENQ FTNQGRRNS | 777 |
| WP_018372492 | 717 | DFKEIIRKAQTIE-NIDT-NQALVSSLPGSPAIKKGILQSLNIVDEIIAIMG-YAPTNIVIEMARENQ TTQKGRDNS | 790 |
| WP_045618028 | 703 | SFKEIIQKAQVVG-KIND-VKQVVQELPGSPAIKKGILQSIKLVDELVKVMG-HAPESIVIEMARENQ TTARGKKNS | 776 |
| WP_045635197 | 702 | SFKEIIQKAQVIG-KTDD-VKQVVQELSGSPAIKKGILQSIKIVDELVKVMG-HAPESIVIEMARENQ TTARGKKNS | 775 |
| WP_002263549 | 704 | SFKEEIAKAQVIG-EIDN-LNQVVSDIAGSPAIKKGILQSLKIVDELVKIMG-HQPENIVVEMARENQ FTNQGRRNS | 777 |
| WP_002263887 | 704 | SFKEEIAKAQVIG-EIDN-LNQVVSDIAGSPAIKKGILQSLKIVDELVKIMG-HQPENIVVEMARENQ FTNQGRRNS | 777 |
| WP_002264920 | 704 | SFKEEIAKAQVIG-EIDN-LNQVVSDIAGSPAIKKGILQSLKIVDELVKIMG-HQPENIVVEMARENQ FTNQGRRNS | 777 |
| WP_002269043 | 704 | SFKEEIAKAQVIG-EIDN-LNQVVSDIAGSPAIKKGILQSLKIVDELVKIMG-HQPENIVVEMARENQ FTNQGRRNS | 777 |
| WP_002269448 | 704 | SFKEEIAKAQVIG-ETDN-LNQVVSDIAGSPAIKKGILQSLKIVDELVKIMG-HQPENIVVEMARENQ FTNQGRQNS | 777 |
| WP_002271977 | 704 | SFKEEIAKAQVIG-ETDN-LNQVVSDIAGSPAIKKGILQSLKIVDELVKIMG-HQPENIVVEMARENQ FTNQGRRNS | 777 |
| WP_002272766 | 704 | SFKEEIAKAQVIG-ETDN-LNQVVSDIAGSPAIKKGILQSLKIVDELVKIMG-HQPENIVVEMARENQ FTNQGRRNS | 777 |
| WP_002273241 | 704 | SFKEEIAKAQVIG-ETDN-LNQVVSDIAGSPAIKKGILQSLKIVDELVKIMG-HQPENIVVEMARENQ FTKQGRRNS | 777 |
| WP_002275430 | 704 | SFKEEIAKAQVIG-ETDN-LNQVVSDIAGSPAIKKGILQSLKIVDELVKIMG-HQPENIVVEMARENQ FTNQGRRNS | 777 |
| WP_002276448 | 704 | SFKEEIAKAQVIG-ETDN-LNQVVSDIAGSPAIKKGILQSLKIVDELVKIMG-HQPENIVVEMARENQ FTKQGRRNS | 777 |
| WP_002277050 | 705 | TFKDDIVKAQYVD-NSDD-LHQVVQSLAGSPAIKKGILQSLKIVDELVKVMG-KEPEQIVVEMARENQ TTAKGRRNS | 778 |
| WP_002277364 | 704 | SFKEEIAKAQVIG-ETDN-LNQVVSDIAGSPAIKKGILQSLKIVDELVKIMG-HQPENIVVEMARENQ FTNQGRRNS | 777 |
| WP_002279025 | 704 | SFKEEIAKAQVIG-ETDN-LNQVVSDIAGSPAIKKGILQSLKIVDELVKIMG-HQPENIVVEMARENQ FTNQGRRNS | 777 |
| WP_002279859 | 704 | SFKEEIAKAQVIG-ETDN-LNQVVSDIAGSPAIKKGILQSLKIVDELVKIMG-HQPENIVVEMARENQ FTNQGRRNS | 777 |
| WP_002280230 | 704 | SFKEEIAKAQVIG-ETDN-LNQVVSDIAGSPAIKKGILQSLKIVDELVKIMG-HQPENIVVEMARENQ FTKQGRRNS | 777 |
| WP_002281696 | 704 | SFKEEIAKAQVIG-ETDN-LNQVVSDIAGSPAIKKGILQSLKIVDELVKIMG-HQPENIVVEMARENQ FTNQGRRNS | 777 |
| WP_002282247 | 705 | TFKDDIVKAQYVD-NSDD-LHQVVQSLAGSPAIKKGILQSLKIVDELVKVMG-KEPEQIVVEMARENQ TTAKGRRNS | 778 |
| WP_002282906 | 704 | SFKEEIAKAQVIG-ETDN-LNQVVSDIAGSPAIKKGILQSLKIVDELVKIMG-HQPENIVVEMARENQ FTNQGRRNS | 777 |
| WP_002283846 | 704 | SFKEEIAKAQVIG-ETDN-LNQVVSDIAGSPAIKKGILQSLKIVDELVKIMG-HQPENIVVEMARENQ FTNQGRRNS | 777 |
| WP_002287255 | 704 | SFKEEIAKAQVIG-ETDN-LNQVVSDIAGSPAIKKGILQSLKIVDELVKIMG-HQPENIVVEMARENQ FTNQGRRNS | 777 |
| WP_002288990 | 704 | SFKEEIAKAQVIG-ETDN-LNQVVSDIAGSPAIKKGILQSLKIVDELVKIMG-HQPENIVVEMARENQ FTNQGRRNS | 777 |
| WP_002289641 | 704 | SFKEEIAKAQVIG-ETDN-LNQVVSDIAGSPAIKKGILQSLKIVDELVKIMG-HQPENIVVEMARENQ FTNQGRRNS | 777 |
| WP_002290427 | 704 | SFKEEIAKAQVIG-ETDN-LNQVVSDIAGSLAIKKGILQSLKIVDELVKIMG-HQPENIVVEMARENQ FTNQGRRNS | 777 |
| WP_002295753 | 704 | SFKEEIAKAQVIG-ETDN-LNQVVSDIAGSPAIKKGILQSLKIVDELVKIMG-HQPENIVVEMARENQ FTKQGRRNS | 777 |
| WP_002296423 | 704 | SFKEEIAKAQVIG-ETDN-LNQVVSDIAGSPAIKKGILQSLKIVDELVKIMG-HQPENIVVEMARENQ FTNQGRRNS | 777 |
| WP_002304487 | 714 | SFKEEIAKAQVIG-EMDG-LNQVVSDIAGSPAIKKGILQSLKIVDELVKVMG-HNPANIVIEMARENQ TTAKGRRSS | 787 |
| WP_002305844 | 704 | SFKEEIAKAQVIG-ETDN-LNQVVSDIAGSPAIKKGILQSLKIVDELVKIMG-HQPENIVVEMARENQ FTKQGRRNS | 777 |
| WP_002307203 | 704 | SFKEEIAKAQVIG-ETDN-LNQVVSDIAGSPAIKKGILQSLKIVDELVKIMG-HQPENIVVEMARENQ FTNQGRRNS | 777 |
| WP_002310390 | 704 | SFKEEIAKAQVIG-ETDN-LNQVVSDIAGSLAIKKGILQSLKIVDELVKIMG-HQPENIVVEMARENQ FTNQGRRNS | 777 |
| WP_002352408 | 704 | SFKEEIAKAQVIG-ETDN-LNQVVSDIAGSPAIKKGILQSLKIVDELVKIMG-HQPENIVVEMARENQ FTNQGQRNS | 777 |
| WP_012997688 | 704 | SFKEEIAKAQVIG-ETDN-LNQVVSDIAGSPAIKKGILQSLKIVDELVKIMG-HQPENIVVEMARENQ FTNQGRRNS | 777 |
| WP_014677909 | 704 | SFKEEIAKAQVIG-ETDN-LNQVVSDIAGSPAIKKGILQSLKIVDELVKIMG-HQPENIVVEMARENQ FTNQGRRNS | 777 |
| WP_019312892 | 704 | SFKEEIAKAQVIG-ETDN-LNQVVSDIAGSPAIKKGILQSLKIVDELVKIMG-HQPENIVVEMARENQ FTNQGRRNS | 777 |
| WP_019313659 | 704 | SFKEEIAKAQVIG-ETDN-LNQVVSDIAGSPAIKKGILQSLKIVDELVKIMG-HQPENIVVEMARENQ FTNQGRRNS | 777 |
| WP_019314093 | 704 | SFKEEIAKAQVIG-ETDN-LNQVVSDIAGSPAIKKGILQSLKIVDELVKIMG-HQPENIVVEMARENQ FTNQGRRNS | 777 |
| WP_019315370 | 704 | SFKEEIAKAQVIG-ETDN-LNQVVSDIAGSPAIKKGILQSLKIVDELVKIMG-HQPENIVVEMARENQ FTNQGRRNS | 777 |
| WP_019803776 | 704 | SFKEEIAKAQVIG-ETDN-LNQVVSDIAGSPAIKKGILQSLKIVDELVKIMG-HQPENIVVEMARENQ FTNQGRRNS | 777 |
| WP_019805234 | 704 | SFKEEIAKAQVIG-ETDN-LNQVVSDIAGSLAIKKGILQNLKIVDELVKIMG-HQPENIVVEMARENQ FTNQGRRNS | 777 |
| WP_024783594 | 704 | SFKEEIAKAQVIG-ETDN-LNQVVSDIAGSPAIKKGILQSLKIVDELVKIMG-HQPENIVVEMARENQ FTNQGRRNS | 777 |
| WP_024784288 | 705 | TFKDDIVKAQYVD-NSDD-LHQVVQSLAGSPAIKKGILQSLKIVDELVKVMG-KEPEQIVVEMARENQ TTAKGRRNS | 778 |
| WP_024784666 | 704 | SFKEEIAKAQVIG-ETDN-LNQVVSDIAGSPAIKKGILQSLKIVDELVKIMG-HQPENIVVEMARENQ FTNQGRRNS | 777 |
| WP_024784894 | 704 | SFKEEIAKAQVIG-ETDN-LNQVVSDIAGSPAIKKGILQSLKIVDELVKIMG-HQPENIVVEMARENQ FTNQGRRNS | 777 |
| WP_024786433 | 705 | TFKDDIVKAQYVD-NSDD-LHQVVQSLAGSPAIKKGILQSLKIVDELVKVMG-KEPEQIVVEMARENQ TTAKGRRNS | 778 |
| WP_049473442 | 704 | SFKEEIAKAQVIG-EIDN-LNQVVSDIAGSPAIKKGILQSLKIVDELVKIMG-HQPENIVVEMARENQ FTNQGRRNS | 777 |
| WP_049474547 | 704 | SFKEEIAKAQVIG-EIDN-LNQVVSDIAGSPAIKKGILQSLKIVDELVKIMG-HQPENIVVEMARENQ FTNQGRRNS | 777 |
| EMC03581 | 697 | SFKEEIAKAQVIG-EIDN-LNQVVSDIAGSPAIKKGILQSLKIVDELVKIMG-HQPENIVVEMARENQ FTNQGRRNS | 770 |
| WP_000428612 | 705 | SFKEIIKKAQVVG-KTDD-VKQVVQELPGSPAIKKGILQSIKLVDELVKVMG-HEPESIVIEMARENQ TTARGKKNS | 778 |
| WP_000428613 | 703 | SFKEITQKAQVVG-KTDD-VKQVVQELPGSPAIKKGILQSIKIVDELVKVMG-HIPESIVIEMARENQ TTARGKKNS | 776 |
| WP_049523028 | 702 | SFKETIQKAQVVG-EIND-VKQVVQELPGSPAIKKGILQSIKIVDELVKVMG-HAPESVVIEMARENQ TTNKGKSKS | 775 |
| WP_003107102 | 672 | DFASIIKEAQEKTiKSEK-LEETIANLAGSPAIKKGILQSVKIVDEVVKVMG-YEPSNIVIEMARENQ STQRGINNS | 746 |
| WP_054279288 | 705 | SFKEEIKKAQEGG-LKDS-INDQIRDLAGSPAIKKGILQIINIVDEIVKIMG-KAPQHIVVEMARDVQ KTDIGVKQS | 778 |
| WP_049531101 | 703 | SFKEIIQESQVVG-KPDD-VKQIVQELPGSSAIKKGILQSIKLVDELVKVMG-HDPESIVIEMARENQ TTARGKKNS | 776 |
| WP_049538452 | 703 | SFKEIIQKAQVFG-KIND-VKQVVQELPGSPAIKKGILQSIKIVEELVKVMG-HEPESIVIEMARENQ TTTRGKKNS | 776 |
| WP_049549711 | 703 | SFKKIIQKSQVVG-ETDD-VKQVVRELPGSPAIKKGILQSIKIVDELVKVMD-HAPESIVIEMARENQ TTARGKKNS | 776 |
| WP_007896501 | 706 | DFEKLIDDAQKKAiKRES-LTEAVANLAGSPAIKKGILQSLKVVDEIVKVMG-HNPDNIVIEMSRENQ TTAQGLKNA | 780 |
| EFR44625 | 658 | DFEKLIDDAQKKAiKRES-LTEAVANLAGSPAIKKGILQSLKVVDEIVKVMG-HNPDNIVIEMSRENQ TTAQGLKNA | 732 |
| WP_002897477 | 702 | SFKEIIQKAQVVG-KTDD-VKQVVQELPGSPAIKKGILQSIKIVDELVKVMG-YALESIVIEMARENQ TTARGKKNS | 775 |
| WP_002906454 | 702 | SFKEIIQKAQVVG-KTDD-VKQVVQEIPGSPAIKKGILQSIKIVDELVKVMG-HNPESIVIEMARENQ TTAKGKKNS | 775 |
| WP_009729476 | 703 | SFKEIIQKAQVVG-KIND-VKQVVQELPGSPAIKKGILQSIKIVDELVKVMG-HAPESIVIEMARENQ TTARGKKNS | 776 |
| CQR24647 | 706 | SFKDEIANSQVIG-DGDD-LHQVVQELAGSPAIKKGILQSLKIVDELVKVMG-YNPEQIVVEMARENQ TTARGRNNS | 779 |
| WP_000066813 | 705 | SFKEIIQKAQVFG-KIND-VKQVVQELPGSPAIKKGILQSIKIVDELVKVMG-HAPESIVIEMARENQ TTARGKKNS | 778 |
| WP_009754323 | 703 | SFKEIIQKAQVVG-KTDD-LIQVVRELSGSPAIKKGILQSIKIVDELVKIMG-YAPESIVIEMARENQ TTAKGKKNS | 776 |
| WP_044674937 | 702 | SFVDEIRLAQGSG-EAED-YRAEVQNLAGSPAIKKGILQSLKIVDELIEVMG-YDPEHIVVEMARENQ FTNQGRRNS | 775 |
| WP_044676715 | 704 | SFVDEIRLAQGSG-EAED-YRAEVQNLAGSPAIKKGILQSLKIVDELIEVMG-YDPEHIVVEMARENQ FTNQGRRNS | 777 |
| WP_044680361 | 704 | SFVDEIRLAQGSG-EAED-YRAEVQNLAGSPAIKKGILQSLKIVDELIEVMG-YDPEHIVVEMARENQ FTNQGRRNS | 777 |
| WP_044681799 | 702 | SFVDEIRLAQGSG-EAED-YRAEVQNLAGSPAIKKGILQSLKIVDELIEVMG-YDPEHIVVEMARENQ FTNQGRRNS | 775 |
| WP_049533112 | 704 | SFKEEIAKAQVIG-ETDD-LNQVVSDIAGSPAIKKGILQSLKIVDELVKVMG-YNPANIVIEMARENQ TTDKGRRNS | 777 |
| WP_029090905 | 683 | LFKKIIEEQFENEtALLN--KQRIDELAASPANKKGIWQAIKIVKELEKVLQ-QPAENIFIEFARSDE ES----KRS | 752 |
| WP_006506696 | 706 | GYAQMIEEATSCPeDGKF-TYEEVERLAGSPALKRGIWQSLQIVEEITKVMK-CRPKYIYIEFERSEE -----KERT | 776 |
| AIT42264 | 703 | TFKEDIQKAQVSG-QGDS-LHEHIANLAGSPAIKKGILQTVKVVDELVKVMGrHKPENIVIEMARENQ TTQKGQKNS | 777 |
| WP_034440723 | 711 | SFKEKIRKAQDIN-QVND-IKEIVKDLPGSPAIKKGIYQSIRIVDEIIRKMK-DRPKNIVIEMARENQ TTQEGKNKS | 784 |
| AKQ21048 | 703 | TFKEDIQKAQVSG-QGDS-LHEHIANLAGSPAIKKGILQTVKVVDELVKVMGrHKPENIVIEMARENQ TTQKGQKNS | 777 |
| WP_004636532 | 707 | SFKKKIEDAQTIE-DITH-IYDTVAELPGSPAIKKGIRQALKIVEEIIDIIG-YEPENIVVEMARESQ TTKKGKDLS | 780 |
| WP_002364836 | 715 | SFKNAIQKAQSSE-HEET-LSETVNELAGSPAIKKGIYQSLKIVDELVAIMG-YAPKRIVVEMARENQ TTSTGKRRS | 788 |
| WP_016631044 | 666 | SFKNAIQKAQSSE-HEET-LSETVNELAGSPAIKKGIYQSLKIVDELVAIMG-YAPKRIVVEMARENQ TTSTGKRRS | 739 |
| EMS75795 | 455 | SFKEELANELALA-GNQS-LLEVVEALLGSPAIKKGIWQTLKIVEELIEIIG-YNPKNIVVEMARENQ RT----NRS | 524 |
| WP_002373311 | 715 | SFKNAIQKAQSSE-HEET-LSETVNELAGSPAIKKGIYQSLKIVDELVAIMG-YAPKRIVVEMARENQ TTSTGKRRS | 788 |
| WP_002378009 | 715 | SFKNAIQKAQSSE-HEET-LSETVNELAGSPAIKKGIYQSLKIVDELVAIMG-YAPKRIVVEMARENQ TTSTGKRRS | 788 |
| WP_002407324 | 715 | SFKNAIQKAQSSE-HEET-LSETVNELAGSPAIKKGIYQSLKIVDELVAIMG-YAPKRIVVEMARENQ TTSTGKRRS | 788 |
| WP_002413717 | 715 | SFKNAIQKAQSSE-HEET-LSETVNELAGSPAIKKGIYQSLKIVDELVAIMG-YAPKRIVVEMARENQ TTSTGKRRS | 788 |
| WP_010775580 | 717 | SFKNAIQKAQSSE-HEET-LSETVNELAGSPAIKKGIYQSLKIVDELVAIMG-YAPKRIVVEMARENQ TTSTGKRRS | 790 |
| WP_010818269 | 715 | SFKNAIQKAQSSE-HEET-LSETVNELAGSPAIKKGIYQSLKIVDELVAIMG-YAPKRIVVEMARENQ TTSTGKRRS | 788 |
| WP_010824395 | 715 | SEKNAIQKAQSSE-HEET-LSETVNELAGSPAIKKGIYQSLKIVDELVAIMG-YAPKRIVVEMARENQ TTSTGKRRS | 788 |
| WP_016622645 | 715 | SEKNAIQKAQSSE-HEET-LSETVNELAGSPAIKKGIYQSLKIVDELVAIMG-YAPKRIVVEMARENQ TTSTGKRRS | 788 |
| WP_033624816 | 715 | SEKNAIQKAQSSE-HEET-LSETVNELAGSPAIKKGIYQSLKIVDELVAIMG-YAPKRIVVEMARENQ TTSTGKRRS | 788 |
| WP_033625576 | 715 | SEKNAIQKAQSSE-HEET-LSETVNELAGSPAIKKGIYQSLKIVDELVAIMG-YAPKRIVVEMARENQ TTSTGKRRS | 788 |
| WP_033789179 | 715 | SEKNAIQKAQSSE-HEET-LSETVNELAGSPAIKKGIYQSLKIVDELVAIMG-YAPKRIVVEMARENQ TTSTGKRRS | 788 |
| WP_002310644 | 715 | SFKKEIKKAQMIT-DTEN-LEEIVKELIGSPAIKKGILQSLKIVDEIVGIMG-YEPANIVVEMARENQ TTGRGLKSS | 788 |
| WP_002312694 | 716 | SFKKEIKKAQMIT-DTEN-LEEIVKELIGSPAIKKGILQSLKIVDEIVGIMG-YEPANIVVEMARENQ TTGRGLKSS | 789 |
| WP_002314015 | 716 | SFKKEIKKAQMIT-DTEN-LEEIVKELIGSPAIKKGILQSLKIVDEIVGIMG-YEPANIVVEMARENQ TTGRGLKSS | 789 |
| WP_002320716 | 716 | SFKKEIKKAQMIT-DTEN-LEEIVKELIGSPAIKKGILQSLKIVDEIVGIMG-YEPANIVVEMARENQ TTGRGLKSS | 789 |
| WP_002330729 | 715 | SFKKEIKKAQMIT-DTEN-LEEIVKELIGSPAIKKGILQSLKIVDEIVGIMG-YEPANIVVEMARENQ TTGRGLKSS | 788 |
| WP_002335161 | 716 | SFKKEIKKAQMIT-DTEN-LEEIVKELIGSPAIKKGILQSLKIVDEIVGIMG-YEPANIVVEMARENQ TTGRGLKSS | 789 |
| WP_002345439 | 716 | SFKKEIKKAQMIT-DTEN-LEEIVKELIGSPAIKKGILQSLKIVDEIVGIMG-YEPANIVVEMARENQ TTGRGLKSS | 789 |
| WP_034867970 | 711 | SEKEEIAKATVES-KHKS-LVDVIQDLPGSPAIKKGIWQSLKIVEELIAIIG-YKPKNIVIEMARENQ KT----HRT | 780 |
| WP_047937432 | 716 | SFKKEIKKAQMIT-DTEN-LEEIVKELIGSPAIKKGILQSLKIVDEIVGIMG-YEPANIVVEMARENQ TTGRGLKSS | 789 |
| WP_010720994 | 711 | SEKEEIAKATVES-KHKS-LVDVIQDLPGSPAIKKGIWQSLKIVEELIAIIG-YKPKNIVIEMARENQ KT----HRT | 780 |
| WP_010737004 | 711 | SEKEEIAKATVES-KHKS-LVDVIQDLPGSPAIKKGIWQSLKIVEELIAIIG-YKPKNIVIEMARENQ KT----HRT | 780 |
| WP_034700478 | 711 | SEKEEIAKATVES-KHKS-LVDVIQDLPGSPAIKKGIWQSLKIVEELIAIIG-YKPKNIVIEMARENQ KT----HRT | 780 |
| WP_007209003 | 708 | SFKKIIEDSQPYK-EQQS-AEEIVSELSGSPAIKKGILQSLKIVDELVAIMG-YKPKNIVVEMARENQ TTGRGKQNS | 781 |
| WP_023519017 | 705 | SEKETIANELIMS-DSNV-LLDQVKAIPGSPAVKKGIWQSIKIVEEIIGIIG-KAPKNIVIEMARENQ RTSR----S | 774 |
| WP_010770040 | 708 | SFKSEIAEAQSDM-NTED-LHEVVQNLAGSPAIKKGILQSLKIVDELVDIMG-SLPKNIVVEMARENQ TTSRGRTNS | 781 |
| WP_048604708 | 704 | TEKEEIEKEQLKA-NSEEsLIEIVQNLAGSPAIKKGIFQSLKIVDELVEIMG-YAPTNIVVEMARENQ TTANGRRNS | 778 |
| WP_010750235 | 710 | SFKEEIAKELTLS-DKQS-LLEVVEAIPGSPAIKKGIWQTLKIVEELIAIIG-YKPKNIVIEMARENQ TTTGGKNRS | 783 |
| AII16583 | 742 | TEKEDIQKAQVSG-QGDS-LHEHIANLAGSPAIKKGILQTVKVVDELVKVMGrHKPENIVIEMARENQ TTQKGQKNS | 816 |
| WP_029073316 | 718 | GFKKTIDDANSTSvSGKF-SYAEVQELAGSPAIKRGIWQALLIVDEIKKIMK-HEPAHVYIEFARNED -----KERK | 788 |
| WP_031589969 | 718 | GFKKTIDDANSTSvSGKF-SYAEVQELAGSPAIKRGIWQALLIVDEIKKIMK-HEPAHVYIEFARNED -----KERK | 788 |
| KDA45870 | 699 | SFKETIKNAQVIE-KEET-LAKTVQELPGSPAIKKGILQSLEIVDEIIKVMG-YKPKSIVVEMARETQ --THGTRKR | 771 |
| WP_039099354 | 713 | DFDKLITEANQMM-LAENdVQDVINDLYTSPQNKKALRQILLVVNDIQKAMKgQAPERILIEFAREDE VNPRLSVQR | 788 |
| AKP02966 | 707 | DFKNYIENHNLNKnEDQN-ISNLVNDIHVSPALKRGITQSIKIVQEIVKFMG-HAPKYIFIEVIRETK TTSRGKRIQ | 785 |
| WP_010991369 | 707 | SFKSIIEKEQVIT-ADKD-IQSIVADLAGSPAIKKGILQSLKIVDELVSVMG-YPPQTIVVEMARENQ TTGKGKNNS | 780 |
| WP_033838504 | 707 | SFKSIIEKEQVIT-ADKD-IQSIVADLAGSPAIKKGILQSLKIVDELVSVMG-YPPQTIVVEMARENQ TTGKGKNNS | 780 |
| EHN60060 | 710 | SFKSIIEKEQVIT-ADKD-IQSIVADLAGSPAIKKGILQSLKIVDELVSVMG-YPPQTIVVEMARENQ TTGKGKNNS | 783 |
| EFR89594 | 476 | SFKSIIEKEQVIT-ADKD-IQSIVADLAGSPAIKKGILQSLKIVDELVSVMG-YPPQTIVVEMARENQ TTGKGKNNS | 549 |
| WP_038409211 | 707 | SFKSIIEKEQVST-ADKG-IQSIVAELAGSPAIKKGILQSLKIVDELVGIMG-YPPQTIVVEMARENQ TTGKGKNNS | 780 |
| EFR95520 | 326 | SFKSIIEKEQVST-ADKG-IQSIVAELAGSPAIKKGILQSLKIVDELVGIMG-YPPQTIVVEMARENQ TTGKGKNNS | 399 |
| WP_003723650 | 707 | SFKSIIEKEQVST-TDKD-LQSIVAELAGSPAIKKGILQSLKIVDELVSIMG-YPPQTIVVEMARENQ TTGKGKNNS | 780 |
| WP_003727705 | 707 | SFKSIIEKEQVST-TDKD-LQSIVADLAGSPAIKKGILQSLKIVDELVSIMG-YPPQTIVVEMARENQ TTGKGKNNS | 780 |
| WP_003730785 | 707 | SFKSIIEKEQVST-TDKD-LQSIVADLAGSPAIKKGILQSLKIVDELVSIMG-YPPQTIVVEMARENQ TTGKGKNNS | 780 |
| WP_003733029 | 707 | SFKSIIEKEQVST-TDKD-LQSIVAELAGSPAIKKGILQSLKIVDELVSVMG-YPPQTIVVEMARENQ TTNKGKNNS | 780 |
| WP_003739838 | 707 | SFKSIIEKEQVST-TDKD-LQSIVADLAGSPAIKKGILQSLKIVDELVSIMG-YPPQTIVVEMARENQ TTVKGKNNS | 780 |
| WP_014601172 | 707 | SFKSIIEKEQVST-TDKD-LQSIVADLAGSPAIKKGILQSLKIVDELVSIMG-YPPQTIVVEMARENQ TTGKGKNNS | 780 |
| WP_023548323 | 707 | SFKSIIEKEQVST-ADKD-LQSIVADLAGSPAIKKGILQSLKVVEELVSVMG-YPPQTIVVEMARENQ TTNKGKNNS | 780 |
| WP_031665337 | 707 | SFKSIIEKEQVST-TDKD-LQSIVAELAGSPAIKKGILQSLKIVDELVSIMG-YPPQTIVVEMARENQ TTGKGKNNS | 780 |
| WP_031669209 | 707 | SFKSIIEKEQVST-ADKD-LQSIVADLAGSPAIKKGILQSLKIVDELVSVMG-YPPQTIVVEMARENQ TTNKGKNNS | 780 |
| WP_033920898 | 707 | SFKSIIEKEQVST-ADKD-LQSIVADLAGSPAIKKGILQSLKVVEELVSVMG-YPPQTIVVEMARENQ TTNKGKNNS | 780 |
| AKI42028 | 710 | SFKSIIEKEQVST-TDKD-LQSIVADLAGSPAIKKGILQSLKIVDELVSIMG-YPPQTIVVEMARENQ TTGKGKNNS | 783 |
| AKI50529 | 710 | SFKSIIEKEQVST-ADKD-LQSIVADLAGSPAIKKGILQSLKVVEELVSVMG-YPPQTIVVEMARENQ TTNKGKNNS | 783 |
| EFR83390 | 155 | SFKSIIEKEQVST-TDKD-LQSIVADLAGSPAIKKGILQSLKIVDELVSIMG-YPPQTIVVEMARENQ TTVKGKNNS | 228 |
| WP_046323366 | 707 | SFKSIIEKEQVST-ADKD-IQSIVADLAGSPAIKKGILQSLKIVDELVGIMG-YPPQTIVVEMARENQ TTGKGKNNS | 780 |
| AKE81011 | 719 | TEKEDIQKAQVSG-QGDS-LHEHIANLAGSPAIKKGILQTVKVVDELVKVMGrHKPENIVIEMARENQ TTQKGQKNS | 793 |
| CUO82355 | 710 | GYAQMIEEASSCPkDGKF-TYEEVAKLAGSPALKRGIWQSLQIVEEITKVMK-CRPKYIYIEFERSEE -----KERT | 780 |
| WP_033162887 | 713 | GYKQIIEESNMQDiEGPF-KYDEVKKLAGSPAIKRGIWQALLVVREITKFMK-HEPSHIYIEFAREEQ -----KVRK | 783 |
| AGZ01981 | 736 | TEKEDIQKAQVSG-QGDS-LHEHIANLAGSPAIKKGILQTVKVVDELVKVMGrHKPENIVIEMARENQ TTQKGQKNS | 810 |
| AKA60242 | 703 | TEKEDIQKAQVSG-QGDS-LHEHIANLAGSPAIKKGILQTVKVVDELVKVMGrHKPENIVIEMARENQ TTQKGQKNS | 777 |
| AKS40380 | 703 | TEKEDIQKAQVSG-QGDS-LHEHIANLAGSPAIKKGILQTVKVVDELVKVMGrHKPENIVIEMARENQ TTQKGQKNS | 777 |
| 4UN5_B | 707 | TEKEDIQKAQVSG-QGDS-LHEHIANLAGSPAIKKGILQTVKVVDELVKVMGrHKPENIVIEMARENQ TTQKGQKNS | 781 |
| WP_010922251 | 778 | [chemical structure] | 841 |
| WP_039695303 | 781 | QQRLKKLQNSLK PSYI E----DK--VE---NSHLQNDQLFLYYIQNGKDMYTGDEL--D--IDHLSDYDIDHI | 851 |
| WP_045635197 | 776 | QQRYKRIEDSLK ILAS NILKENP--TD---NNQLQNDRLFLYYLQNGKDMYTGEAL--D--INQLSSYDIDHI | 843 |
| 5AXW_A | 488 | KDAQKMINEMQK QTNE EIIRTIGk--E---NAKYLIEKIKLHDMQEGKCLYSLEAIplEdlLNNPFNYEVDHI | 561 |
| WP_009880683 | 462 | RERMKRIEEGIK ELGS DILKEYP--VE---NTQLQNEKLYLYYLQNGRDMYVDQEL--D--INRLSDYDVDHI | 525 |
| WP_010922251 | 778 | RERMKRIEEGIK ELGS QILKEHP--VE---NTQLQNEKLYLYYLQNGRDMYVDQEL--D--INRLSDYDVDHI | 841 |
| WP_011054416 | 778 | RERMKRIEEGIK ELGS DILKEYP--VE---NTQLQNEKLYLYYLQNGRDMYVDQEL--D--INRLSDYDVDHI | 841 |
| WP_011284745 | 778 | RERMKRIEEGIK ELGS QILKEHP--VE---NTQLQNEKLYLYYLQNGRDMYVDQEL--D--INRLSDYDVDHI | 841 |
| WP_011285506 | 778 | RERMKRIEEGIK ELGS QILKEHP--VE---NTQLQNEKLYLYYLQNGRDMYVDQEL--D--INRLSDYDVDHI | 841 |
| WP_011527619 | 778 | RERMKRIEEGIK ELGS QILKEHP--VE---NTQLQNEKLYLYYLQNGRDMYVDQEL--D--INRLSDYDVDHI | 841 |
| WP_012560673 | 778 | RERMKRIEEGIK ELGS DILKEYP--VE---TTQLQNEKLYLYYLQNGRDMYVDQEL--D--INRLSDYDVDHI | 841 |
| WP_014407541 | 777 | RERMKRIEEGIK ELGS QILKEHP--VE---NTQLQNEKLYLYYLQNGRDMYVDQEL--D--INRLSDYDVDHI | 840 |
| WP_020905136 | 778 | RERMKRIEEGIK ELGS QILKEHP--VE---NTQLQNEKLYLYYLQNGRDMYVDQEL--D--INRLSDYDVDHI | 841 |
| WP_023080005 | 777 | RERMKRIEEGIK ELGS QILKEHP--VE---NTQLQNEKLYLYYLQNGRDMYVDQEL--D--INRLSDYDVDHI | 840 |
| WP_023610282 | 777 | RERMKRIEEGIK ELGS QILKEHP--VE---NTQLQNEKLYLYYLQNGRDMYVDQEL--D--INRLSDYDVDHI | 840 |
| WP_030125963 | 778 | RERMKRIEEGIK ELGS DILKEYP--VE---NTQLQNEKLYLYYLQNGRDMYVDQEL--D--INRLSDYDVDHI | 841 |
| WP_030126706 | 778 | RERMKRIEEGIK ELGS DILKEYP--VE---NTQLQNEKLYLYYLQNGRDMYVDQEL--D--INRLSDYDVDHI | 841 |
| WP_031488318 | 778 | RERMKRIEEGIK ELGS DILKEYP--VE---NTQLQNEKLYLYYLQNGRDMYVDQEL--D--INRLSDYDVDHI | 841 |
| WP_032460140 | 778 | RERMKRIEEGIK ELGS DILKEYP--VE---NTQLQNEKLYLYYLQNGRDMYVDQEL--D--INRLSDYDVDHI | 841 |
| WP_032461047 | 778 | RERMKRIEEGIK ELGS DILKEYP--VE---NTQLQNEKLYLYYLQNGRDMYVDQEL--D--INRLSDYDVDHI | 841 |
| WP_032462016 | 778 | RERMKRIEEGIK ELGS QILKEHP--VE---NTQLQNEKLYLYYLQNGRDMYVDQEL--D--INRLSDYDVDHI | 841 |
| WP_032462936 | 778 | RERMKRIEEGIK ELGS DILKEYP--VE---NTQLQNEKLYLYYLQNGRDMYVDQEL--D--INRLSDYDVDHI | 841 |
| WP_032464890 | 778 | RERMKRIEEGIK ELGS QILKEHP--VE---NTQLQNEKLYLYYLQNGRDMYVDQEL--D--INRLSDYDVDHI | 841 |
| WP_033888930 | 603 | RERMKRIEEGIK ELGS QILKEHP--VE---NTQLQNEKLYLYYLQNGRDMYVDQEL--D--INRLSDYDVDHI | 666 |
| WP_038431314 | 778 | RERMKRIEEGIK ELGS DILKEYP--VE---NTQLQNEKLYLYYLQNGRDMYVDQEL--D--INRLSDYDVDHI | 841 |
| WP_038432938 | 777 | RERMKRIEEGIK ELGS QILKEHP--VE---NTQLQNEKLYLYYLQNGRDMYVDQEL--D--INRLSDYDVDHI | 840 |
| WP_038434062 | 778 | RERMKRIEEGIK ELGS DILKEYP--VE---NTQLQNEKLYLYYLQNGRDMYVDQEL--D--INRLSDYDVDHI | 841 |
| BAQ51233 | 689 | RERMKRIEEGIK ELGS QILKEHP--VE---NTQLQNEKLYLYYLQNGRDMYVDQEL--D--INRLSDYDVDHI | 752 |
| KGE60162 | 1 | ------------ ---- -------------------------------------QEL--D--INRLSGYDVDHI | 16 |
| KGE60856 | | ------------ ---- --------------------------------------------------------- | |
| WP_002989955 | 778 | RERMKRIEEGIK ELGS QILKEHP--VE---NTQLQNEKLYLYYLQNGRDMYVDQEL--D--INRLSDYDVDHI | 841 |
| WP_003030002 | 778 | QQRLKLLQDSLK PVNI K-----N--VE---NQQLQNDRLFLYYIQNGKDMYTGETL--D--INNLSQYDIDHI | 840 |
| WP_003065552 | 781 | QQRLKKLQNSLK PSYI E----DK--VE---NSHLQNDQLFLYYIQNGKDMYTGDEL--D--IDHLSDYDIDHI | 851 |
| WP_001040076 | 776 | RQRLTTLRESLA NLKS EKKPKYV--KDqveNHHLSDDRLFLYYLQNGKDMYTDDEL--D--IDNLSQYDIDHI | 846 |
| WP_001040078 | 779 | RQRYKLLDDGVK NLAS NILKEYP--TD---NQALQNERLFLYYLQNGRDMYTGEAL--D--IDNLSQYDIDHI | 846 |
| WP_001040080 | 779 | RQRYKLLDDGVK NLAS NILKEYP--TD---NQALQNERLFLYYLQNGRDMYTGEAL--D--IDNLSQYDIDHI | 846 |
| WP_001040081 | 779 | RQRYKLLDDGVK NLAS NILKEYP--TD---NQALQNERLFLYYLQNGRDMYTGEAL--D--IDNLSQYDIDHI | 846 |
| WP_001040083 | 779 | RQRYKLLDDGVK NLAS NILKEYP--TD---NQALQNERLFLYYLQNGRDMYTGEAL--D--IDNLSQYDIDHI | 846 |
| WP_001040085 | 779 | RQRYKLLDDGVK NLAS NILKEYP--TD---NQALQNERLFLYYLQNGRDMYTGEAL--D--IDDLSQYDIDHI | 846 |
| WP_001040087 | 779 | RQRYKLLDDGVK NLAS NILKEYP--TD---NQALQNERLFLYYLQNGRDMYTGEAL--D--IDNLSQYDIDHI | 846 |
| WP_001040088 | 779 | RQRYKLLDDGVK NLAS NILKEYP--TD---NQALQNERLFLYYLQNGRDMYTGEAL--D--IDNLSQYDIDHI | 846 |
| WP_001040089 | 779 | RQRYKLLDDGVK NLAS NILKEYP--TD---NQALQNERLFLYYLQNGRDMYTGEAL--D--IDNLSQYDIDHI | 846 |
| WP_001040090 | 779 | RQRYKLLDDGVK NLAS NILKEYP--TD---NQALQNERLFLYYLQNGRDMYTGEAL--D--IDNLSQYDIDHI | 846 |
| WP_001040091 | 779 | RQRYKLLDDGVK NLAS NILKEYP--TD---NQALQNERLFLYYLQNGRDMYTGEAL--D--IDNLSQYDIDHI | 846 |
| WP_001040092 | 779 | RQRYKLLEDGVK NLAS DILKEYP--TD---NQALQNERLFLYYLQNGRDMYTGEAL--D--IDNLSQYDIDHI | 846 |
| WP_001040094 | 776 | RQRLTTLRESLA NLKS EKKPKYV--KDqveNHHLSDDRLFLYYLQNGKDMYTDDEL--D--IDNLSQYDIDHI | 846 |
| WP_001040095 | 776 | RQRLTTLRESLA NLKS EKKPKYV--KDqveNHHLSDDRLFLYYLQNGKDMYTDDEL--D--IDNLSQYDIDHI | 846 |
| WP_001040096 | 776 | RQRLTTLRESLA NLKS EKKPKYV--KDqveNHHLSDDRLFLYYLQNGKDMYTDDEL--D--IDNLSQYDIDHI | 846 |
| WP_001040097 | 776 | RQRLTTLRESLA NLKS EKKPKYV--KDqveNHHLSDDRLFLYYLQNGKDMYTDDEL--D--IDNLSQYDIDHI | 846 |
| WP_001040098 | 776 | RQRLTTLRESLA NLKS EKKPKYV--KDqveNHHLSDDRLFLYYLQNGKDMYTDDEL--D--IDNLSQYDIDHI | 846 |
| WP_001040099 | 776 | RQRLTTLRESLA NLKS EKKPKYV--KDqveNHHLSDDRLFLYYLQNGKDMYTDDEL--D--IDNLSQYDIDHI | 846 |
| WP_001040100 | 776 | RQRLTTLRESLA NLKS EKKPKYV--KDqveNHHLSDDRLFLYYLQNGKDMYTDDEL--D--IDNLSQYDIDHI | 846 |
| WP_001040104 | 779 | RQRYKLLDDGVK NLAS NILKEYP--TD---NQALQNERLFLYYLQNGRDMYTGEAL--D--IDNLSQYDIDHI | 846 |
| WP_001040105 | 779 | RQRYKLLDDGVK NLAS NILKEYP--TD---NQALQNERLFLYYLQNGRDMYTGEAL--D--IDNLSQYDIDHI | 846 |
| WP_001040106 | 779 | RQRYKLLEEGVK NLAS NILKEYP--TD---NQALQNERLFLYYLQNGRDMYTGEAL--D--IDNLSQYDIDHI | 846 |
| WP_001040107 | 779 | RQRYKLLEEGVK NLAS NILKEYP--TD---NQALQNERLFLYYLQNGRDMYTGEAL--D--IDNLSQYDIDHI | 846 |
| WP_001040108 | 779 | RQRYKLLEEGVK NLAS NILKEYP--TD---NQALQNERLFLYYLQNGRDMYTGETL--D--IDNLSQYDIDHI | 846 |
| WP_001040109 | 779 | RQRYKLLEEGVK NLAS NILKEYP--TD---NQALQNERLFLYYLQNGRDMYTGEAL--D--IDNLSQYDIDHI | 846 |
| WP_001040110 | 779 | RQRYKLLEEGVK NLAS NILKEYP--TD---NQALQNERLFLYYLQNGRDMYTGEAL--D--IDNLSQYDIDHI | 846 |
| WP_015058523 | 779 | RQRYKLLEDGVK NLAS DILKEYP--TD---NQALQNERLFLYYLQNGRDMYTGEAL--D--IDNLSQYDIDHI | 846 |
| WP_017643650 | 776 | RQRLTTLRESLA NLKS EKKPKYV--KDqveNHHLSDDRLFLYYLQNGKDMYTDDEL--D--IDNLSQYDIDLI | 846 |
| WP_017647151 | 779 | RQRYKLLDDGVK NLAS NILKEYP--TD---NQALQNERLFLYYLQNGRDMYTGKAL--D--IDNLSQYDIDHI | 846 |
| WP_017648376 | 779 | RQRYKLLDDGVK NLAS NILKEYP--TD---NQALQNERLFLYYLQNGRDMYTGKAL--D--IDNLSQYDIDHI | 846 |
| WP_017649527 | 779 | RQRYKLLDDGVK NLAS NILKEYP--TD---NQALQNERLFLYYLQNGRDMYTGEAL--D--IDNLSQYDIDHI | 846 |
| WP_017771611 | 779 | RQRYKLLEEGVK NLAS NILKEYP--TD---NQALQNERLFLYYLQNGRDMYTGEAL--D--IDNLSQYDIDHI | 846 |
| WP_017771984 | 779 | RQRYKLLDDGVK NLAS NILKEYP--TD---NQALQNERLFLYYLQNGRDMYTGEAL--D--IDNLSQYDIDHI | 846 |
| CFQ25032 | 779 | RQRYKLLDDGVK NLAS NILKEYP--TD---NQALQNERLFLYYLQNGRDMYTGEAL--D--IDNLSQYDIDHI | 846 |
| CFV16040 | 779 | RQRYKLLDDGVK NLAS NILKEYP--TD---NQALQNERLFLYYLQNGRDMYTGEAL--D--IDNLSQYDIDHI | 846 |
| KLJ37842 | 779 | RQRYKLLDDGVK NLAS NILKEYP--TD---NQALQNERLFLYYLQNGRDMYTGEAL--D--IDNLSQYDIDHI | 846 |
| KLJ72361 | 779 | RQRYKLLDDGVK NLAS NILKEYP--TD---NQALQNERLFLYYLQNGRDMYTGEAL--D--IDNLSQYDIDHI | 846 |
| KLL20707 | 793 | RQRYKLLDDGVK NLAS NILKEYP--TD---NQALQNERLFLYYLQNGRDMYTGEAL--D--IDNLSQYDIDHI | 860 |
| KLL42645 | 779 | RQRYKLLEEGVK NLAS NILKEYP--TD---NQALQNERLFLYYLQNGRDMYTGEAL--D--IDNLSQYDIDHI | 846 |
| WP_047207273 | 779 | RQRYKLLDDGVK NLAS NILKEYP--TD---NQALQNERLFLYYLQNGRDMYTGEAL--D--IDNLSQYDIDHI | 846 |
| WP_047209694 | 776 | RQRLTTLRESLA NLKS EKKPKYV--KDqveNHHLSDDRLFLYYLQNGKDMYTDDEL--D--IDNLSQYDIDHI | 846 |
| WP_050198062 | 779 | RQRYKLLDDGVK NLAS NILKEYP--TD---NQALQNERLFLYYLQNGRDMYTGEAL--D--IDNLSQYDIDHI | 846 |
| WP_050201642 | 779 | RQRYKLLDDGVK NLAS NILKEYP--TD---NQALQNERLFLYYLQNGRDMYTGEAL--D--IDNLSQYDIDHI | 846 |
| WP_050204027 | 779 | RQRYKLLEEGVK NLAS NILKEYP--TD---NQALQNERLFLYYLQNGRDMYTGEAL--D--IDNLSQYDIDHI | 846 |
| WP_050881965 | 779 | RQRYKLLDDGVK NLAS NILKEYP--TD---NQALQNERLFLYYLQNGRDMYTGEAL--D--IDNLSQYDIDHI | 846 |
| WP_050886065 | 779 | RQRYKLLDDGVK NLAS NILKEYP--TD---NQALQNERLFLYYLQNGRDMYTGEAL--D--IDNLSQYDIDHI | 846 |
| AHN30376 | 779 | RQRYKLLEDGVK NLAS DILKEYP--TD---NQALQNERLFLYYLQNGRDMYTGEAL--D--IDSLSQYDIDHI | 846 |
| EAO78426 | 779 | RQRYKLLDDGVK NLAS NILKEYP--TD---NQALQNERLFLYYLQNGRDMYTGEAL--D--IDNLSQYDIDHI | 846 |
| CCW42055 | 779 | RQRYKLLDDGVR NLAS NILKEYP--TD---NQALQNERLFLYYLQNGRDMYTEKAL--D--IDNLSQYDIDHI | 846 |
| WP_003041502 | 778 | QQRLKLLQDSLK PVNI K-----N--VE---NQQLQNDRLFLYYIQNGKDMYTGETL--D--INNLSQYDIDHI | 840 |
| WP_037593752 | 779 | QQRLKLLQDSLK PVNI K-----N--VE---NQQLQNDRLFLYYIQNGKDMYTGETL--D--INNLSQYDIDHI | 841 |
| WP_049516684 | 779 | QQRLKLLQDSLK PVNI K-----N--VE---NQQLQNDRLFLYYIQNGKDMYTGETL--D--INNLSQYDIDHI | 841 |
| GAD46167 | 778 | QQRLKLLQDSLK PVNI K-----N--VE---NQQLQNDRLFLYYIQNGKDMYTGETL--D--INNLSQYDIDHI | 840 |
| WP_018363470 | 779 | QQRLKKLQNSLK PSYI E----DK--VE---NSHLQNDQLFLYYIQNGKDMYTGDEL--D--IDHLSDYDIDHI | 849 |
| WP_003043819 | 787 | RERKKRIEEGIK ELES QILKENP--VE---NTQLQNEKLYLYYLQNGRDMYVDQEL--D--INRLSDYDVDHI | 850 |
| WP_006269658 | 778 | QQRLKLLQDSLK PVNI K-----N--VE---NQQLQNDRLFLYYIQNGKDMYTGETL--D--INNLSQYDIDHI | 840 |
| WP_048800889 | 778 | QQRLKLLQDSLT PVSI K-----N--VE---NQQLQNDRLFLYYIQNGKDMYTGEEL--D--IHHLSDYDIDHI | 840 |
| WP_012767106 | 777 | RERMKRIEEGIK ELGS QILKEHP--VE---NTQLQNEKLYLYYLQNGRDMYVDQEL--D--INRLSDYDVDHI | 840 |
| WP_014612333 | 777 | RERMKRIEEGIK ELGS QILKEHP--VE---NTQLQNEKLYLYYLQNGRDMYVDQEL--D--INRLSDYDVDHI | 840 |
| WP_015017095 | 777 | RERMKRIEEGIK ELGS QILKEHP--VE---NTQLQNEKLYLYYLQNGRDMYVDQEL--D--INRLSDYDVDHI | 840 |
| WP_015057649 | 777 | RERMKRIEEGIK ELGS QILKEHP--VE---NTQLQNEKLYLYYLQNGRDMYVDQEL--D--INRLSDYDVDHI | 840 |
| WP_048327215 | 777 | RERMKRIEEGIK ELGS QILKEHP--VE---NTQLQNEKLYLYYLQNGRDMYVDQEL--D--INRLSDYDVDHI | 840 |
| WP_049519324 | 777 | RERMKRIEEGIK ELGS QILKEHP--VE---NTQLQNEKLYLYYLQNGRDMYVDQEL--D--INRLSDYDVDHI | 840 |
| WP_012515931 | 777 | RQRMRKLEETAK KLGS NILKEHP--VD---NSQLQNDKRYLYYLQNGKDMYTGDDL--D--IDYLSSYDIDHI | 840 |
| WP_021320964 | 777 | RQRMRKLEETAK KLGS NILKEHP--VD---NSQLQNDKRYLYYLQNGKDMYTGDDL--D--IDYLSSYDIDHI | 840 |
| WP_037581760 | 777 | RQRMRKLEETAK KLGS NILKEHP--VD---NSQLQNDKRYLYYLQNGKDMYTGDDL--D--IDYLSSYDIDHI | 840 |
| WP_004232481 | 778 | NQRLKRLQDSLK PSYV D----SK--VE---NSHLQNDRLFLYYIQNGKDMYTGEEL--D--IDHLSDYDIDHI | 848 |
| WP_009854540 | 779 | QQRLKKLQSSLK PSYI E----DK--VE---NSHLQNDQLFLYYIQNGKDMYTGDEL--D--IDHLSDYDIDHI | 849 |
| WP_012962174 | 779 | QQRLKKLQDSLK PSYI E----GK--VE---NNHLQDDRLFLYYIQNGKDMYTGDEL--D--IDHLSDYDIDHI | 849 |
| WP_039695303 | 781 | QQRLKKLQNSLK PSYI E----DK--VE---NSHLQNDQLFLYYIQNGKDMYTGDEL--D--IDHLSDYDIDHI | 851 |
| WP_014334983 | 778 | NQRLKRLQDSLK PSYV D----SK--VE---NSHLQNDRLFLYYIQNGKDMYTGEEL--D--IDRLSDYDIDHI | 848 |
| WP_003099269 | 778 | RQRLRKLEEVHK NTGS KILKEYN--VS---NTQLQSDRLYLYLLQDGKDMYTGKEL--D--YDNLSQYDIDHI | 841 |
| AHY15608 | 778 | RQRLRKLEEVHK NTGS KILKEYN--VS---NTQLQSDRLYLYLLQDGKDMYTGKEL--D--YDNLSQYDIDHI | 841 |
| AHY17476 | 778 | RQRLRKLEEVHK NTGS KILKEYN--VS---NTQLQSDRLYLYLLQDGKDMYTGKEL--D--YDNLSQYDIDHI | 841 |
| ESR09100 | | ------------ ---- --------------------------------------------------------- | |
| AGM98575 | 778 | RQRLRKLEEVHK NTGS KILKEYN--VS---NTQLQSDRLYLYLLQDGKDMYTGKEL--D--YDNLSQYDIDHI | 841 |
| ALF27331 | 778 | QQRLKGLTDSIK EFGS QILKEHP--VE---NSQLQNDRLFLYYLQNGRDMYTGEEL--D--IDYLSQYDIDHI | 841 |
| WP_018372492 | 791 | AQRLKKIEDGIK -LGS DLLKQNP--IQd--NKDLQKEKLFLYYMQNGIDLYTGQPLncD--PDSLAFYDVDHI | 857 |
| WP_045618028 | 777 | QQRYKRIEDALK NLAH NILKEHP--TD---NIQLQNDRLFLYYLQNGKDMYTGKSL--D--INQLSSCDIDHI | 844 |
| WP_045635197 | 776 | QQRYKRIEDSLK ILAS NILKENP--TD---NNQLQNDRLFLYYLQNGKDMYTGEAL--D--INQLSSYDIDHI | 843 |
| WP_002263549 | 778 | QQRLKGLTDSIK EFGS QILKEHP--VE---NSQLQNDRLFLYYLQNGRDMYTGEEL--D--IDYLSQYDIDHI | 841 |
| WP_002263887 | 778 | QQRLKGLTDSIK EFGS QILKEHP--VE---NSQLQNDRLFLYYLQNGRDMYTGEEL--D--IDYLSQYDIDHI | 841 |
| WP_002264920 | 778 | QQRLKGLTDSIK EFGS QILKEHP--VE---NSQLQNDRLFLYYLQNGRDMYTGEEL--D--IDYLSQYDIDHI | 841 |
| WP_002269043 | 778 | QQRLKGLTDSIK EFGS QILKEHP--VE---NSQLQNDRLFLYYLQNGRDMYTGEEL--D--IDYLSQYDIDHI | 841 |
| WP_002269448 | 778 | QQRLKGLTDSIK EFGS QILKEHP--VE---NSQLQNDRLFLYYLQNGRDMYTGEEL--D--IDYLSQYDIDHI | 841 |
| WP_002271977 | 778 | QQRLKGLTDSIK EFGS QILKEHP--VE---NSQLQNDRLFLYYLQNGRDMYTGEEL--D--IDYLSQYDIDHI | 841 |
| WP_002272766 | 778 | QQRLKGLTDSIK EFGS QILKEHP--VE---NSQLQNDRLFLYYLQNGRDMYTGEEL--D--IDYLSQYDIDHI | 841 |
| WP_002273241 | 778 | QQRLKGLTDSIK EFGS QILKEHP--VE---NSQLQNDRLFLYYLQNGRDMYTGEEL--D--IDYLSQYDIDHI | 841 |
| WP_002275430 | 778 | QQRLKGLTDSIK EFGS QILKEHP--VE---NSQLQNDRLFLYYLQNGRDMYTGEEL--D--IDYLSQYDIDHI | 841 |
| WP_002276448 | 778 | QQRLKGLTDSIK EFGS QILKEHP--VE---NSQLQNDRLFLYYLQNGRDMYTGEEL--D--IDYLSQYDIDHI | 841 |
| WP_002277050 | 779 | QQRYKRLKEAIK DLNH KILKEHP--TD---NQALQNNRLFLYYLQNGRDMYTGESL--D--INRLSDYDIDHV | 846 |
| WP_002277364 | 778 | QQRLKGLTDSIK EFGS QILKEHP--VE---HSQLQNDRLFLYYLQNGRDMYTGEEL--D--IDYLSQYDIDHI | 841 |
| WP_002279025 | 778 | QQRLKGLTDSIK EFGS QILKEHP--VE---NSQLQNDRLFLYYLQNGRDMYTGEEL--D--IDYLSQYDIDHI | 841 |
| WP_002279859 | 778 | QQRLKGLTDSIK EFGS QILKEHP--VE---NSQLQNDRLFLYYLQNGRDMYTGEEL--D--IDYLSQYDIDHI | 841 |
| WP_002280230 | 778 | QQRLKGLTDSIK EFGS QILKEHP--VE---NSQLQNDRLFLYYLQNGRDMYTGEEL--D--IDYLSQYDIDHI | 841 |
| WP_002281696 | 778 | QQRLKGLTDSIK EFGS QILKEHP--VE---NSQLQNDRLFLYYLQNGRDMYTGEEL--D--IDYLSQYDIDHI | 841 |
| WP_002282247 | 779 | QQRYKRLKEAIK DLNH KILKEHP--TD---NQALQNNRLFLYYLQNGRDMYTGESL--D--INRLSDYDIDHV | 846 |
| WP_002282906 | 778 | QQRLKGLTDSIK EFGS QILKEHP--VE---NSQLQNDRLFLYYLQNGRDMYTGEEL--D--IDYLSQYDIDHI | 841 |
| WP_002283846 | 778 | QQRLKGLTDSIK EFGS QILKEHP--VE---NSQLQNDRLFLYYLQNGRDMYTGEEL--D--IDYLSQYDIDHI | 841 |
| WP_002287255 | 778 | QQRLKGLTDSIK EFGS QILKEHP--VE---HSQLQNDRLFLYYLQNGRDMYTGEEL--D--IDYLSQYDIDHI | 841 |
| WP_002288990 | 778 | QQRLKGLTDSIK EFGS QILKEHP--VE---NSQLQNDRLFLYYLQNGRDMYTGEEL--D--IDYLSQYDIDHI | 841 |
| WP_002289641 | 778 | QQRLKGLTDSIK EFGS QILKEHP--VE---NSQLQNDRLFLYYLQNGRDMYTGEEL--D--IDYLSQYDIDHI | 841 |
| WP_002290427 | 778 | QQRLKGLTDSIK EFGS QILKEHP--VE---NSQLQNDRLFLYYLQNGRDMYTGEEL--D--IDYLSQYDIDHI | 841 |
| WP_002295753 | 778 | QQRLKGLTDSIK EFGS QILKEHP--VE---NSQLQNDRLFLYYLQNGRDMYTGEEL--D--IDYLSQYDIDHI | 841 |
| WP_002296423 | 778 | QQRLKGLTDSIK EFGS QILKEHP--VE---NSQLQNDRLFLYYLQNGRDMYTGEEL--D--IDYLSQYDIDHI | 841 |
| WP_002304487 | 788 | QKRYKRLEEAIK DLNH KILKEHP--TD---NQALQNDRLFLYYLQNGRDMYTEDPL--D--INRLSDYDIDHI | 855 |
| WP_002305844 | 778 | QQRLKGLTDSIK EFGS QILKEHP--VE---NSQLQNDRLFLYYLQNGRDMYTGEEL--D--IDYLSQYDIDHI | 841 |
| WP_002307203 | 778 | QQRLKGLTDSIK EFGS QILKEHP--VE---NSQLQNDRLFLYYLQNGRDMYTGEEL--D--IDYLSQYDIDHI | 841 |
| WP_002310390 | 778 | QQRLKGLTDSIK EFGS QILKEHP--VE---NSQLQNDRLFLYYLQNGRDMYTGEEL--D--IDYLSQYDIDHI | 841 |
| WP_002352408 | 778 | QQRLKGLTDSIK EFGS QILKEHP--VE---NSQLQNDRLFLYYLQNGRDMYTGEEL--D--IDYLSQYDIDHI | 841 |
| WP_012997688 | 778 | QQRLKGLTDSIK EFGS QILKEHP--VK---HSQLQNDRLFLYYLQNGRDMYTGEEL--D--IDYLSQYDIDHI | 841 |
| WP_014677909 | 778 | QQRLKGLTDSIK EFGS QILKEHP--VE---NSQLQNDRLFLYYLQNGRDMYTGEEL--D--IDYLSQYDIDHI | 841 |
| WP_019312892 | 778 | QQRLKGLTDSIK EFGS QILKEHP--VE---NSQLQNDRLFLYYLQNGRDMYTGEEL--D--IDYLSQYDIDHI | 841 |
| WP_019313659 | 778 | QQRLKGLTDSIK EFGS QILKEHP--VE---NSQLQNDRLFLYYLQNGRDMYTGEEL--D--IDYLSQYDIDHI | 841 |
| WP_019314093 | 778 | QQRLKGLTDSIK EFGS QILKEHP--VE---NSQLQNDRLFLYYLQNGRDMYTGEEL--D--IDYLSQYDIDHI | 841 |
| WP_019315370 | 778 | QQRLKGLTDSIK EFGS QILKEHP--VE---NSQLQNDRLFLYYLQNGRDMYTGEEL--D--IDYLSQYDIDHI | 841 |
| WP_019803776 | 778 | QQRLKGLTDSIK EFGS QILKEHP--VE---NSQLQNDRLFLYYLQNGRDMYTGEEL--D--IDYLSQYDIDHI | 841 |
| WP_019805234 | 778 | QQRLKGLTDSIK EFGS QILKEHP--VE---NSQLQNDRLFLYYLQNGRDMYTGEEL--D--IDYLSQYDIDHI | 841 |
| WP_024783594 | 778 | QQRLKGLTDSIK EFGS QILKEHP--VE---NSQLQNDRLFLYYLQNGRDMYTGEEL--D--IDYLSQYDIDHI | 841 |
| WP_024784288 | 779 | QQRYKRLKEAIK DLNH KILKEHP--TD---NQALQNNRLFLYYLQNGRDMYTGESL--D--INRLSDYDIDHV | 846 |
| WP_024784666 | 778 | QQRLKGLTDSIK EFGS QILKEHP--VE---HSQLQNDRLFLYYLQNGRDMYTGEEL--D--IDYLSQYDIDHI | 841 |
| WP_024784894 | 778 | QQRLKGLTDSIK EFGS QILKEHP--VE---NSQLQNDRLFLYYLQNGRDMYTGEEL--D--IDYLSQYDIDHI | 841 |
| WP_024786433 | 779 | QQRYKRLKEAIK DLNH KILKEHP--TD---NQALQNNRLFLYYLQNGRDMYTGESL--D--INRLSDYDIDHV | 846 |
| WP_049473442 | 778 | QQRLKGLTDSIK EFGS QILKEHP--VE---NSQLQNDRLFLYYLQNGRDMYTGEEL--D--IDYLSQYDIDHI | 841 |
| WP_049474547 | 778 | QQRLKGLTDSIK EFGS QILKEHP--VE---NSQLQNDRLFLYYLQNGRDMYTGEEL--D--IDYLSQYDIDHI | 841 |
| EMC03581 | 771 | QQRLKGLTDSIK EFGS QILKEHP--VE---HSQLQNDRLFLYYLQNGRDMYTGEEL--D--IDYLSQYDIDHI | 834 |
| WP_000428612 | 779 | QQRYKRIEDSLK ILAS KILKEHP--TD---NIQLQNDRLFLYYLQNGRDMYTGKPL--D--INQLSSYDIDHI | 846 |
| WP_000428613 | 777 | QQRYKRIEDALK NLAS NILKEHP--TN---NIQLQNDRLFLYYLQNGRDMYTGKPL--D--INQLSSYDIDHI | 844 |
| WP_049523028 | 776 | QQRLKTLSDAIS ELG- NILKEHP--TD---NIQLQNDRLFLYYLQNGKDMYTGEAL--D--INQLSNYDIDHI | 839 |
| WP_003107102 | 747 | RERLRKLEEVHK NIGS KILKEHE--IS---NAQLQSDRVYLYLLQDGKDMYTGKDL--D--FDRLSQYDIDHI | 810 |
| WP_054279288 | 779 | RERMKRVQEVLK KLGS QLLKEHP--VE---NFQLQNERLYLYYLQNGKDMYTGEEL--S--ISNLSHYDIDHI | 842 |
| WP_049531101 | 777 | QQRYKRIEDSLK ILAS NILKEHP--TD---NIQLQNDRLFLYYLQNGKDMYTGNPL--D--INHLSSYDIDHI | 844 |
| WP_049538452 | 777 | QQRYKRIENSLK ILAS KILKEHP--TD---NNQLQNDRLFLYYLQNGKDMYTGEAL--D--INQLSSCDIDHI | 844 |
| WP_049549711 | 777 | QQRYKRIEDSLK ILAS NILKENP--TD---NNQLQNDRLFLYYLQNGKDMYTGEAL--D--INQLSSYDIDHI | 844 |
| WP_007896501 | 781 | RQRLKKIKEVHK KTGS RILEDNSerIT---NLTLQDNRLYLYLLQDGKDMYTGQDL--D--INNLSQYDIDHI | 846 |
| EFR44625 | 733 | RQRLKKIKEVHK KTGS RILEDNSerIT---NLTLQDNRLYLYLLQDGKDMYTGQDL--D--INNLSQYDIDHI | 798 |
| WP_002897477 | 776 | QQRYKRIEDALK NLAP NILKENP--TD---NIQLKNDRLFLYYLQNGKDMYTGKPL--D--INQLSSYDIDHI | 843 |
| WP_002906454 | 776 | QQRYKRIEDALK NLAP NILKENP--TD---NIQLQNDRLFLYYLQNGKDMYTGKAI--D--INQLSNYDIDHI | 843 |
| WP_009729476 | 777 | QQRYKRIEDSLK ILAS KILKEHP--TD---NIQLQNDRLFLYYLQNGKDMYTGEAL--D--INQLSSCDIDHI | 844 |
| CQR24647 | 780 | QQRLGSLTKAIQ DFGS DILKRYP--VE---NNQLQNDQLYLYYLQNGKDMYTGDTL--D--IHNLSQYDIDHI | 843 |
| WP_000066813 | 779 | QQRYKRIEDSLK NLAS NILKENP--TD---NIQLQNDRLFLYYLQNGRDMYTGKPL--E--INQLSNYDIDHI | 846 |
| WP_009754323 | 777 | QQRYKRIEDALK NLAP TISKENP--TD---NIQLQNDRLFLYYLQNGKDMYTGEAL--D--INQLSSYDIDHI | 844 |
| WP_044674937 | 776 | QQRYKKIENAIK NLNS KILKEYP--TN---NQALQNDRLFLYYLQNGKDMYTDEEL--D--IDQLSQYDIDHI | 843 |
| WP_044676715 | 778 | QQRYKKIENAIK NLNS KILKEYP--TN---NQALQNDRLFLYYLQNGKDMYTDEEL--D--IDQLSQYDIDHI | 845 |
| WP_044680361 | 778 | QQRYKKIENAIK NLNS KILKEYP--TN---NQALQNDRLFLYYLQNGKDMYTDEEL--D--IDQLSQYDIDHI | 845 |
| WP_044681799 | 776 | QQRYKKIENAIK NLNS KILKEYP--TN---NQALQNDRLFLYYLQNGKDMYTDEEL--D--IDQLSQYDIDHI | 843 |
| WP_049533112 | 778 | QQRLKLLQDSLK PVNI K-----N--VE---NQQLQNDRLFLYYIQNGKDMYTGETL--D--INNLSQYDIDHI | 840 |
| WP_029090905 | 753 | TPRDKFIEKAYA ETDT EHLKELK---Qr--SKQLSSQRLFLYFIQNGKCMYSGEHL--D--IERLDSYEVDHI | 823 |
| WP_006506696 | 777 | ESKIKKLENVYK DEQT SVLEELKg-FDn--TKKISSDSLFLYFTQLGKCMYSGKKL--D--IDSLDKYQIDHI | 849 |
| AI T42264 | 778 | RERMKRIEEGIK ELGS QILKEHP--VE---NTQLQNEKLYLYYLQNGRDMYVDQEL--D--INRLSDYDVDHI | 841 |
| WP_034440723 | 785 | KARLKKIQEGLE NLDS HVEKQAL---D---EEMLKSPKYYLYCLQNGKDIYTGKDL--D--IGQLQTYDIDHI | 848 |
| AKQ21048 | 778 | RERMKRIEEGIK ELGS QILKEHP--VE---NTQLQNEKLYLYYLQNGRDMYVDQEL--D--INRLSDYDVDHI | 841 |
| WP_004636532 | 781 | KERLEKLTEAIK EFDG --VKVKD--LK---NENLRNDRLYLYYLQNGRDMYTNEPL--D--INNLSKYDIDHI | 845 |
| WP_002364836 | 789 | IQRLKIVEKAMA EIGS NLLKEQP--TT---NEQLRDTRLFLYYMQNGKDMYTGDEL--S--LHRLSHYDIDHI | 852 |
| WP_016631044 | 740 | IQRLKIVEKAMA EIGS NLLKEQP--TT---NEQLRDTRLFLYYMQNGKDMYTGDEL--S--LHRLSHYDIDHI | 803 |
| EM575795 | 525 | KPRLKALEEALK SFDS PLLKEQP--VD---NQALQKDRLYLYYLQNGKDMYTGEAL--D--IDRLSEYDIDHI | 588 |
| WP_002373311 | 789 | IQRLKIVEKAMA EIGS NLLKEQP--TT---NEQLRDTRLFLYYMQNGKDMYTGDEL--S--LHRLSHYDIDHI | 852 |
| WP_002378009 | 789 | IQRLKIVEKAMA EIGS NLLKEQP--TT---NEQLRDTRLFLYYMQNGKDMYTGDEL--S--LHRLSHYDIDHI | 852 |
| WP_002407324 | 789 | IQRLKIVEKAMA EIGS NLLKEQP--TT---NEQLRDTRLFLYYMQNGKDMYTGDEL--S--LHRLSHYDIDHI | 852 |
| WP_002413717 | 789 | IQRLKIVEKAMA EIGS NLLKEQP--TT---NEQLRDTRLFLYYMQNGKDMYTGDEL--S--LHRLSHYDIDHI | 852 |
| WP_010775580 | 791 | IQRLKIVEKAMA EIGS NLLKEQP--TT---NEQLRDTRLFLYYMQNGKDMYTGDEL--S--LHRLSHYDIDHI | 854 |
| WP_010818269 | 789 | IQRLKIVEKAMA EIGS NLLKEQP--TT---NEQLRDTRLFLYYMQNGKDMYTGDEL--S--LHRLSHYDIDHI | 852 |
| WP_010824395 | 789 | IQRLKIVEKAMA EIGS NLLKEQP--TT---NEQLRDTRLFLYYMQNGKDMYTGDEL--S--LHRLSHYDIDHI | 852 |
| WP_016622645 | 789 | IQRLKIVEKAMA EIGS NLLKEQP--TT---NEQLRDTRLFLYYMQNGKDMYTGDEL--S--LHRLSHYDIDHI | 852 |
| WP_033624816 | 789 | IQRLKIVEKAMA EIGS NLLKEQP--TT---NEQLRDTRLFLYYMQNGKDMYTGDEL--S--LHRLSHYDIDHI | 852 |
| WP_033625576 | 789 | IQRLKIVEKAMA EIGS NLLKEQP--TT---NEQLRDTRLFLYYMQNGKDMYTGDEL--S--LHRLSHYDIDHI | 852 |
| WP_033789179 | 789 | IQRLKIVEKAMA EIGS NLLKEQP--TT---NEQLRDTRLFLYYMQNGKDMYTGDEL--S--LHRLSHYDIDHI | 852 |
| WP_002310644 | 789 | RPRLKALEESLK DFGS QLLKEYP--TD---NSSLQKDRLYLYYLQNGRDMYTGAPL--D--IHRLSDYDIDHI | 852 |
| WP_002312694 | 790 | RPRLKALEESLK DFGS QLLKEYP--TD---NSSLQKDRLYLYYLQNGRDMYTGAPL--D--IHRLSDYDIDHI | 853 |
| WP_002314015 | 790 | RPRLKALEESLK DFGS QLLKEYP--TD---NSSLQKDRLYLYYLQNGRDMYTGAPL--D--IHRLSDYDIDHI | 853 |
| WP_002320716 | 790 | RPRLKALEESLK DFGS QLLKEYP--TD---NSSLQKDRLYLYYLQNGRDMYTGAPL--D--IHRLSDYDIDHI | 853 |
| WP_002330729 | 789 | RPRLKALEESLK DFGS QLLKEYP--TD---NSSLQKDRLYLYYLQNGRDMYTGAPL--D--IHRLSDYDIDHI | 852 |
| WP_002335161 | 790 | RPRLKALEESLK DFGS QLLKEYP--TD---NSSLQKDRLYLYYLQNGRDMYTGAPL--D--IHRLSDYDIDHI | 853 |
| WP_002345439 | 790 | RPRLKALEESLK DFGS QLLKEYP--TD---NSSLQKDRLYLYYLQNGRDMYTGAPL--D--IHRLSDYDIDHI | 853 |
| WP_034867970 | 781 | SPRLKALENGLK QIGS TLLKEQP--TD---NKALQKERLYLYYLQNGRDMYTGEPL--E--IENLHQYEVDHI | 844 |
| WP_047937432 | 790 | RPRLKALEESLK DFGS QLLKEYP--TD---NSSLQKDRLYLYYLQNGRDMYTGAPL--D--IHRLSDYDIDHI | 853 |
| WP_010720994 | 781 | KPRLKALENGLK QIGS TLLKEQP--TD---NKALQKERLYLYYLQNGRDMYTGEPL--E--IENLHQYEVDHI | 844 |
| WP_010737004 | 781 | SPRLKALENGLK QIGS TLLKEQP--TD---NKALQKERLYLYYLQNGRDMYTGEPL--E--IENLHQYEVDHI | 844 |
| WP_034700478 | 781 | KPRLKALENGLK QIGS TLLKEQP--TD---NKALQKERLYLYYLQNGRDMYTGEPL--E--IENLHQYEVDHI | 844 |
| WP_007209003 | 782 | KPRLKGIENGLK EFSD SVLKGSS--ID---NKQLQNDRLYLYYLQNGKDMYTGHEL--D--IDHLSTYDIDHI | 845 |
| WP_023519017 | 775 | RPRLKALEEALK NIDS PLLKDYP--TD---NQALQKDRLYLYYLQNGKDMYTGEPL--E--IHRLSEYDIDHI | 838 |
| WP_010770040 | 782 | NPRMKALEEAMR NLRS NLLKEYP--TD---NQALQNDRLYLYYLQNGKDMYTGLDL--S--LHNLSSYDIDHI | 845 |
| WP_048604708 | 779 | RPRLKNLEKAID DLDS EILKKHP--VD---NKALQKDRLYLYYLQNGKDMYTNEEL--D--IHKLSTYDIDHI | 842 |
| WP_010750235 | 784 | KPRLKSLEEALK NFDS QLLKERP--VD---NQSLQKDRLYLYYLQNGKDMYTGESL--D--IDRLSEYDIDHI | 847 |
| AII16583 | 817 | RERMKRIEEGIK ELGS QILKEHP--VE---NTQLQNEKLYLYYLQNGRDMYVDQEL--D--INRLSDYDVDHI | 880 |
| WP_029073316 | 789 | DSFVNQMLKLYK DFED EANKHLKg-EDa--KSKIRSERLKLYYTQMGKCMYTGKSL--D--IDRLDTYQVDHI | 860 |
| WP_031589969 | 789 | DSFVNQMLKLYK DFED EANKHLKg-EDa--KSKIRSERLKLYYTQMGKCMYTGKSL--D--IDRLDTYQVDHI | 860 |
| KDA45870 | 772 | EDRVQQIVKNLK ELPK ------P---S---NAELSDERKYLYCLQNGRDMYTGAPL--D--YDHLQFYDVDHI | 833 |
| WP_039099354 | 789 | KRQVEQVYQNIS EL-- EIRNELK---Dl-sNSALSNTRLFLYFMQGGRDMYTGDSL--N--IDRLSTYDIDHI | 856 |
| AKP02966 | 786 | RLQSKLLNKANG -LVP EELKKHKn--D------LSSERIMLYFLQNGKSLYSEESL--N--INKLSDYQVDHI | 858 |
| WP_010991369 | 781 | RPRYKSLEKAIK EFGS QILKEHP--TD---NQELRNNRLYLYYLQNGKDMYTGQDL--D--IHNLSNYDIDHI | 844 |
| WP_033838504 | 781 | RPRYKSLEKAIK EFGS QILKEHP--TD---NQELRNNRLYLYYLQNGKDMYTGQDL--D--IHNLSNYDIDHI | 844 |
| EHN60060 | 784 | RPRYKSLEKAIK EFGS QILKEHP--TD---NQELRNNRLYLYYLQNGKDMYTGQDL--D--IHNLSNYDIDHI | 847 |
| EFR89594 | 550 | RPRYKSLEKAIK EFGS QILKEHP--TD---NQELKNNRLYLYYLQNGKDMYTGQDL--D--IHNLSNYDIDHI | 613 |
| WP_038409211 | 781 | KPRFISLEKAIK EFGS QILKEHP--TD---NQCLKNDRLYLYYLQNGKDMYTGKEL--D--IHNLSNYDIDHI | 844 |
| EFR95520 | 400 | KPRFISLEKAIK EFGS QILKEHP--TD---NQCLKNDRLYLYYLQNGKDMYTGKEL--D--IHNLSNYDIDHI | 463 |
| WP_003723650 | 781 | KPRYKSLEKAIK EFGS QILKEHP--TD---NQELKNNRLYLYYLQNGKDMYTGQEL--D--IHNLSNYDIDHI | 844 |
| WP_003727705 | 781 | KPRYKSLEKAIK DFGS QILKEHP--TD---NQELKNNRLYLYYLQNGKDIYTGQEL--D--IHNLSNYDIDHI | 844 |
| WP_003730785 | 781 | KPRYKSLEKAIK DFGS QILKEHP--TD---NQELKNNRLYLYYLQNGKDIYTGQEL--D--IHNLSNYDIDHI | 844 |
| WP_003733029 | 781 | KPRYKSLEKAIK EFGS QILKEHP--TD---NQELKNNRLYLYYLQNGKDMYTGQEL--D--IHNLSNYDIDHI | 844 |
| WP_003739838 | 781 | RPRYKSLEKAIK EFGS QILKEHP--TD---NQELRNNRLYLYYLQNGKDMYTGQEL--D--IHNLSNYDIDHI | 844 |
| WP_014601172 | 781 | KPRYKSLEKAIK EFGS KILKEHP--TD---NQELKNNRLYLYYLQNGKDMYTGQEL--D--IHNLSNYDIDHI | 844 |
| WP_023548323 | 781 | KPRYKSLEKAIK EFGS QILKEHP--TD---NQELKNNRLYLYYLQNGKDMYTGQEL--D--IHNLSNYDIDHI | 844 |
| WP_031665337 | 781 | KPRYKSLEKAIK EFGS QILKEHP--TD---NQELKNNRLYLYYLQNGKDMYTGQEL--D--IHNLSNYDIDHI | 844 |
| WP_031669209 | 781 | KPRYKSLEKAIK EFGS QILKEHP--TD---NQELKNNRLYLYYLQNGKDMYTGQEL--D--IHNLSNYDIDHI | 844 |
| WP_033920898 | 781 | KPRYKSLEKAIK EFGS QILKEHP--TD---NQELKNNRLYLYYLQNGKDMYTGQEL--D--IHNLSNYDIDHI | 844 |
| AKI42028 | 784 | KPRYKSLEKAIK EFGS KILKEHP--TD---NQELKNNRLYLYYLQNGKDMYTGQEL--D--IHNLSNYDIDHI | 847 |
| AKI50529 | 784 | KPRYKSLEKAIK EFGS QILKEHP--TD---NQELKNNRLYLYYLQNGKDMYTGQEL--D--IHNLSNYDIDHI | 847 |
| EFR83390 | 229 | RPRYKSLEKAIK EFGS QILKEHP--TD---NQELKNNRLYLYYLQNGKDIYTGQEL--D--IHNLSNYDIDHI | 292 |
| WP_046323366 | 781 | KPRFTSLEKAIK ELGS QILKEHP--TD---NQGLKNDRLYLYYLQNGKDMYTGQEL--D--IHNLSNYDIDHV | 844 |
| AKE81011 | 794 | RERMKRIEEGIK ELGS QILKEHP--VE---NTQLQNEKLYLYYLQNGRDMYVDQEL--D--INRLSDYDVDHI | 857 |
| CUO82355 | 781 | ESKIKKLENVYK DEQT SVLEELKg-FDn--TKKISSDSLFLYFTQLGKCMYSGKKL--D--IDSLDKYQIDHI | 853 |
| WP_033162887 | 784 | ESKIAKLQKIYE NLQT QVYESLKk-EDa--KKRMETDALYLYYLQMGKSMYSGKPL--D--IDKLSTYQIDHI | 855 |
| AGZ01981 | 811 | RERMKRIEEGIK ELGS QILKEHP--VE---NTQLQNEKLYLYYLQNGRDMYVDQEL--D--INRLSDYDVDHI | 874 |
| AKA60242 | 778 | RERMKRIEEGIK ELGS QILKEHP--VE---NTQLQNEKLYLYYLQNGRDMYVDQEL--D--INRLSDYDVDAI | 841 |
| AKS40380 | 778 | RERMKRIEEGIK ELGS QILKEHP--VE---NTQLQNEKLYLYYLQNGRDMYVDQEL--D--INRLSDYDVDHI | 841 |
| 4UN5_B | 782 | RERMKRIEEGIK ELGS QILKEHP--VE---NTQLQNEKLYLYYLQNGRDMYVDQEL--D--INRLSDYDVDAI | 845 |
| WP_010922251 | 842 | [chemical structure] | 910 |
| WP_039695303 | 852 | IPQAFIKDDSIDNRVLISSAKNRG-KSDD--VP S--LDIVRARKA-EWVRLYKSGLISKRKEDNLTKA--ERGGLTE | 920 |
| WP_045635197 | 844 | IPQAFIKDDSLDNRVLISSKDNRG-KSDN--VP S--IEVVQKRKA-FWQQLLDSKLISERKFNNLTKA--ERGGLDE | 912 |
| 5AXW_A | 562 | IPRSVSFDNSFNNKVLVKQEEASK-KGNR--TP Fqy-LSSSDSKI-SYETFKKHILNLAKGKGRISKTk-KEYLLEE | 632 |
| WP_009880683 | 526 | VPQSFLKDDSIDNKVLIRSDKNRG-KSDN--VP S--EEVVKKMKN-YWKQLLNAKLITQRKFDNLTKA--ERGGLSE | 594 |
| WP_010922251 | 842 | VPQSFLKDDSIDNKVLIRSDKNRG-KSDN--VP S--EEVVKKMKN-YWRQLLNAKLITQRKFDNLTKA--ERGGLSE | 910 |
| WP_011054416 | 842 | VPQSFLKDDSIDNKVLIRSDKNRG-KSDN--VP S--EEVVKKMKN-YWRQLLNAKLITQRKFDNLTKA--ERGGLSE | 910 |
| WP_011284745 | 842 | VPQSFIKDDSIDNKVLIRSDKNRG-KSNN--VP S--EEVVKKMKN-YWRQLLNAKLITQRKFDNLTKA--ERGGLSE | 910 |
| WP_011285506 | 842 | VPQSFLKDDSIDNKVLIRSDKNRG-KSDN--VP S--EEVVKKMKN-YWRQLLNAKLITQRKFDNLTKA--ERGGLSE | 910 |
| WP_011527619 | 842 | VPQSFIKDDSIDNKVLIRSDKNRG-KSDN--VP S--EEVVKKMKN-YWRQLLNAKLITQRKFDNLTKA--ERGGLSE | 910 |
| WP_012560673 | 842 | VPQSFLKDDSIDNKVLIRSDKNRG-KSDN--VP S--EEVVKKMKN-YWKQLLNAKLITQRKFDNLTKA--ERGGLSE | 910 |
| WP_014407541 | 841 | VPQSFIKDDSIDNKVLIRSDKNRG-KSDN--VP S--EEVVKKMKN-YWRQLLNAKLITQRKFDNLTKA--ERGGLSE | 909 |
| WP_020905136 | 842 | VPQSFIKDDSIDNKVLIRSDKNRG-KSDN--VP S--EEVVKKMKN-YWRQLLNAKLITQRKFDNLTKA--ERGGLSE | 910 |
| WP_023080005 | 841 | VPQSFLKDDSIDNKVLIRSDKNRG-KSDN--VP S--EEVVKKMKN-YWRQLLNAKLITQRKFDNLTKA--ERGGLSE | 909 |
| WP_023610282 | 841 | VPQSFLKDDSIDNKVLIRSDKNRG-KSDN--VP S--EEVVKKMKN-YWRQLLNAKLITQRKFDNLTKA--ERGGLSE | 909 |
| WP_030125963 | 842 | VPQSFIKDDSIDNKVLIRSDKNRG-KSDN--VP S--EEVVKKMKN-YWRQLLNAKLITQRKFDNLTKA--ERGGLSE | 910 |
| WP_030126706 | 842 | VPQSFLKDDSIDNKVLIRSDKNRG-KSDN--VP S--EEVVKKMKN-YWRQLLNAKLITQRKFDNLTKA--ERGGLSE | 910 |
| WP_031488318 | 842 | VPQSFIKDDSIDNKVLIRSDKNRG-KSDN--VP S--EEVVKKMKN-YWKQLLNAKLITQRKFDNLTKA--ERGGLSE | 910 |
| WP_032460140 | 842 | VPQSFLKDDSIDNKVLIRSDKNRG-KSDN--VP S--EEVVKKMKN-YWKQLLNAKLITQRKFDNLTKA--ERGGLSE | 910 |
| WP_032461047 | 842 | VPQSFLKDDSIDNKVLIRSDKNRG-KSDN--VP S--EEVVKKMKN-YWKQLLNAKLITQRKFDNLTKA--ERGGLSE | 910 |
| WP_032462016 | 842 | VPQSFLKDDSIDNKVLIRSDKNRG-KSDN--VP S--EEVVKKMKN-YWRQLLNAKLITQRKFDNLTKA--ERGGLSE | 910 |
| WP_032462936 | 842 | VPQSFLKDDSIDNKVLIRSDKNRG-KSDN--VP S--EEVVKKMKN-YWKQLLNAKLITQRKFDNLTKA--ERGGLSE | 910 |
| WP_032464890 | 842 | VPQSFIKDDSIDNKVLIRSDKNRG-KSDN--VP S--EEVVKKMKN-YWRQLLNAKLITQRKFDNLTKA--ERGGLSE | 910 |
| WP_033888930 | 667 | VPQSFLKDDSIDNKVLIRSDKNRG-KSDN--VP S--EEVVKKMKN-YWRQLLNAKLITQRKFDNLTKA--ERGGLSE | 735 |
| WP_038431314 | 842 | VPQSFLKDDSIDNKVLIRSDKNRG-KSDN--VP S--EEVVKKMKN-YWRQLLNAKLITQRKFDNLTKA--ERGGLSE | 910 |
| WP_038432938 | 841 | VPQSFLKDDSIDNKVLIRSDKNRG-KSDN--VP S--EEVVKKMKN-YWRQLLNAKLITQRKFDNLTKA--ERGGLSE | 909 |
| WP_038434062 | 842 | VPQSFLKDDSIDNKVLIRSDKNRG-KSDN--VP S--EEVVKKMKN-YWKQLLNAKLITQRKFDNLTKA--ERGGLSE | 910 |
| BAQ51233 | 753 | VPQSFLKDDSIDNKVLIRSDKNRG-KSDN--VP S--EEVVKKMKN-YWRQLLNAKLITQRKFDNLTKA--ERGGLSE | 821 |
| KGE60162 | 17 | VPQSFLKDDSIDNKVLIRSDKNRG-KSDN--VP S--EEVVKKMKN-YWRQLLNAKLITQRKFDNLTKA--ERGGLSE | 85 |
| KGE60856 | | --------------------------------- -------------------------------------------- | |
| WP_002989955 | 842 | VPQSFIKDDSIDNKVLIRSDKNRG-KSDN--VP S--EEVVKKMKN-YWRQLLNAKLITQRKFDNLTKA--ERGGLSE | 910 |
| WP_003030002 | 841 | IPQAFIKDNSLDNRVLIRSDKNRG-KSDD--VP S--IEVVHEMKS-FWSKLLSVKLITQRKFDNLTKA--ERGGLTE | 909 |
| WP_003065552 | 852 | IPQAFIKDDSIDNRVLISSAKNRG-KSDD--VP S--LDIVRARKA-EWVRLYKSGLISKRKEDNLTKA--ERGGLTE | 920 |
| WP_001040076 | 847 | IPQAFIKDDSIDNRVLVSSAKNRG-KSDD--VP S--LEIVKDCKV-FWKKLLDAKLMSQRKYDNLTKA--ERGGLTS | 915 |
| WP_001040078 | 847 | IPQAFIKDDSIDNRVLVSSAKNRG-KSDD--VP S--LEIVKDCKV-FWKKLLDAKLMSQRKYDNLTKA--ERGGLTS | 915 |
| WP_001040080 | 847 | IPQAFIKDDSIDNRVLVSSAKNRG-KSDD--VP S--LEIVKDCKV-FWKKLLDAKLMSQRKYDNLTKA--ERGGLTS | 915 |
| WP_001040081 | 847 | IPQAFIKDDSIDNRVLVSSAKNRG-KSDD--VP S--LEIVKDCKV-FWKKLLDAKLMSQRKYDNLTKA--ERGGLTS | 915 |
| WP_001040083 | 847 | IPQAFIKDDSIDNRVLVSSAKNRG-KSDD--VP S--LEIVKDCKV-FWKKLLDAKLMSQRKYDNLTKA--ERGGLTS | 915 |
| WP_001040085 | 847 | IPQAFIKDDSIDNRVLVSSAKNRG-KSDD--VP S--LEIVKDCKV-FWKKLLDAKLMSQRKYDNLTKA--ERGGLTS | 915 |
| WP_001040087 | 847 | IPQAFIKDDSIDNRVLVSSAKNRG-KSDD--VP S--LEIVKDCKV-FWKKLLDAKLMSQRKYDNLTKA--ERGGLTS | 915 |
| WP_001040088 | 847 | IPQAFIKDDSIDNRVLVSSAKNRG-KSDD--VP S--LEIVKDCKV-FWKKLLDAKLMSQRKYDNLTKA--ERGGLTS | 915 |
| WP_001040089 | 847 | IPQAFIKDDSIDNRVLVSSAKNRG-KSDD--VP S--LEIVKDCKV-FWKKLLDAKLMSQRKYDNLTKA--ERGGLTS | 915 |
| WP_001040090 | 847 | IPQAFIKDDSIDNRVLVSSAKNRG-KSDD--VP S--LEIVKDCKV-FWKKLLDAKLMSQRKYDNLTKA--ERGGLTS | 915 |
| WP_001040091 | 847 | IPQAFIKDDSIDNRVLVSSAKNRG-KSDD--VP S--LEIVKDCKV-FWKKLLDAKLMSQRKYDNLTKA--ERGGLTS | 915 |
| WP_001040092 | 847 | VPQAFIKDDSIDNRVLVSSAKNRG-KSDD--VP S--IDIVKARKA-FWKKLLDAKLISQRKYDNLTKA--ERGGLTP | 915 |
| WP_001040094 | 847 | IPQAFIKDDSIDNRVLVSSAKNRG-KSDD--VP S--VEIVKDCKV-FWKKLLDAKLMSQRKYDNLTKA--ERGGLTS | 915 |
| WP_001040095 | 847 | IPQAFIKDDSIDNRVLVSSAKNRG-KSDD--VP S--LEIVKDCKV-FWKKLLDAKLMSQRKYDNLTKA--ERGGLTS | 915 |
| WP_001040096 | 847 | IPQAFIKDDSIDNRVLVSSAKNRG-KSDD--VP S--LEIVKDCKV-FWKKLLDAKLMSQRKYDNLTKA--ERGGLTS | 915 |
| WP_001040097 | 847 | IPQAFIKDDSIDNRVLVSSAKNRG-KSDD--VP S--VEIVKDCKV-FWKKLLDAKLMSQRKYDNLTKA--ERGGLTS | 915 |
| WP_001040098 | 847 | IPQAFIKDDSIDNRVLVSSAKNRG-KSDD--VP S--VEIVKDCKV-FWKKLLDAKLMSQRKYDNLTKA--ERGGLTS | 915 |
| WP_001040099 | 847 | IPQAFIKDDSIDNRVLVSSAKNRG-KSDD--VP S--VEIVKDCKV-FWKKLLDAKLMSQRKYDNLTKA--ERGGLTS | 915 |
| WP_001040100 | 847 | IPQAFIKDDSIDNRVLVSSAKNRG-KSDD--VP S--VEIVKDCKV-FWKKLLDAKLMSQRKYDNLTKA--ERGGLTS | 915 |
| WP_001040104 | 847 | IPQAFIKDDSIDNRVLVSSAKNRG-KSDD--VP S--LEIVKDCKV-FWKKLLDAKLMSQRKYDNLTKA--ERGGLTS | 915 |
| WP_001040105 | 847 | IPQAFIKDDSIDNRVLVSSAKNRG-KSDD--VP S--LEIVKDCKV-FWKKLLDAKLMSQRKYDNLTKA--ERGGLTS | 915 |
| WP_001040106 | 847 | VPQAFIKDDSIDNRVLVSSAKNRG-KSDN--VP S--IDIVKARKA-FWKKLLDAKLMSQRKYDNLTKA--ERGGLTS | 915 |
| WP_001040107 | 847 | VPQAFIKDDSIDNRVLVSSAKNRG-KSDN--VP S--IDIVKARKA-FWKKLLDAKLMSQRKYDNLTKA--ERGGLTS | 915 |
| WP_001040108 | 847 | VPQAFIKDDSIDNRVLVSSAKNRG-KSDN--VP S--IDIVKARKA-FWKKLLDAKLMSQRKYDNLTKA--ERGGLTS | 915 |
| WP_001040109 | 847 | VPQAFIKDDSIDNRVLVSSAKNRG-KSDN--VP S--IDIVKARKA-FWKKLLDAKLMSQRKYDNLTKA--ERGGLTS | 915 |
| WP_001040110 | 847 | VPQAFIKDDSIDNRVLVSSAKNRG-KSDN--VP S--IDIVKARKA-FWKKLLDAKLMSQRKYDNLTKA--ERGGLTS | 915 |
| WP_015058523 | 847 | VPQAFIKDDSIDNRVLVSSAKNRG-KSDD--VP S--IDIVKARKA-FWKKLLDAKLISQRKYDNLTKA--ERGGLTP | 915 |
| WP_017643650 | 847 | IPQAFIKDDSIDNRVLVSSAKNRG-KSDD--VP S--VEIVKDCKV-FWKKLLDAKLMSQRKYDNLTKA--ERGGLTS | 915 |
| WP_017647151 | 847 | IPQAFIKDDSIDNRVLVSSAKNRG-KSDD--VP S--LEIVKDCKV-FWKKLLDAKLMSQRKYDNLTKA--ERGGLTS | 915 |
| WP_017648376 | 847 | IPQAFIKDDSIDNRVLVSSAKNRG-KSDD--VP S--LEIVKDCKV-FWKKLLDAKLMSQRKYDNLTKA--ERGGLTS | 915 |
| WP_017649527 | 847 | IPQAFIKDDSIDNRVLVSSAKNRG-KSDD--VP S--LEIVKDCKV-FWKKLLDAKLMSQRKYDNLTKA--ERGGLTS | 915 |
| WP_017771611 | 847 | VPQAFIKDDSIDNRVLVSSAKNRG-KSDN--VP S--IDIVKARKA-FWKKLLDAKLMSQRKYDNLTKA--ERGGLTS | 915 |
| WP_017771984 | 847 | IPQAFIKDDSIDNRVLVSSAKNRG-KSDD--VP S--LEIVKDCKV-FWKKLLDAKLMSQRKYDNLTKA--ERGGLTS | 915 |
| CFQ25032 | 847 | IPQAFIKDDSIDNRVLVSSAKNRG-KSDD--VP S--LEIVKDCKV-FWKKLLDAKLMSQRKYDNLTKA--ERGGLTS | 915 |
| CFV16040 | 847 | IPQAFIKDDSIDNRVLVSSAKNRG-KSDD--VP S--LEIVKDCKV-FWKKLLDAKLMSQRKYDNLTKA--ERGGLTS | 915 |
| KLJ37842 | 847 | IPQAFIKDDSIDNRVLVSSAKNRG-KSDD--VP S--LEIVKDCKV-FWKKLLDAKLMSQRKYDNLTKA--ERGGLTS | 915 |
| KLJ72361 | 847 | IPQAFIKDDSIDNRVLVSSAKNRG-KSDD--VP S--LEIVKDCKV-FWKKLLDAKLMSQRKYDNLTKA--ERGGLTS | 915 |
| KLL20707 | 861 | IPQAFIKDDSIDNRVLVSSAKNRG-KSDD--VP S--LEIVKDCKV-FWKKLLDAKLMSQRKYDNLTKA--ERGGLTS | 929 |
| KLL42645 | 847 | VPQAFIKDDSIDNRVLVSSAKNRG-KSDN--VP S--IDIVKARKA-FWKKLLDAKLMSQRKYDNLTKA--ERGGLTS | 915 |
| WP_047207273 | 847 | IPQAFIKDDSIDNRVLVSSAKNRG-KSDD--VP S--LEIVKDCKV-FWKKLLDAKLMSQRKYDNLTKA--ERGGLTS | 915 |
| WP_047209694 | 847 | IPQAFIKDDSIDNRVLVSSAKNRG-KSDD--VP S--VEIVKDCKV-FWKKLLDAKLMSQRKYDNLTKA--ERGGLTS | 915 |
| WP_050198062 | 847 | IPQAFIKDDSIDNRVLVSSAKNRG-KSDD--VP S--LEIVKDCKV-FWKKLLDAKLMSQRKYDNLTKA--ERGGLTS | 915 |
| WP_050201642 | 847 | IPQAFIKDDSIDNRVLVSSAKNRG-KSDD--VP S--LEIVKDCKV-FWKKLLDAKLMSQRKYDNLTKA--ERGGLTS | 915 |
| WP_050204027 | 847 | VPQAFIKDDSIDNRVLVSSAKNRG-KSDN--VP S--IDIVKARKA-FWKKLLDAKLMSQRKYDNLTKA--ERGGLTS | 915 |
| WP_050881965 | 847 | IPQAFIKDDSIDNRVLVSSAKNRG-KSDD--VP S--LEIVKDCKV-FWKKLLDAKLMSQRKYDNLTKA--ERGGLTS | 915 |
| WP_050886065 | 847 | IPQAFIKDDSIDNRVLVSSAKNRG-KSDD--VP S--LEIVKDCKV-FWKKLLDAKLMSQRKYDNLTKA--ERGGLTS | 915 |
| AHN30376 | 847 | VPQAFIKDDSIDNRVLVSSAKNRG-KSDD--VP S--IDIVKARKA-FWKKLLDAKLISQRKYDNLTKA--ERGGLTP | 915 |
| EAO78426 | 847 | IPQAFIKDDSIDNRVLVSSAKNRG-KSDD--VP S--LEIVKDCKV-FWKKLLDAKLMSQRKYDNLTKA--ERGGLTS | 915 |
| CCW42055 | 847 | IPQAFIKDDSIDNRVLVSSAKNRG-KSDD--VP S--LEIVKDCKV-FWKKLLDAKLMSQRKYDNLTKA--ERGGLTS | 915 |
| WP_003041502 | 841 | IPQAYIKDDSFDNRVLTSSSENRG-KSDN--VP S--IEVVCARKA-DWMRLRKAGLISQRKEDNLTKA--ERGGLTE | 909 |
| WP_037593752 | 842 | IPQAFIKDNSLDNRVLTRSDKNRG-KSDD--VP S--IEVVHEMKS-FWSKLLSVKLITQRKEDNLTKA--ERGGLTE | 910 |
| WP_049516684 | 842 | IPQAFIKDNSLDNRVLTRSDKNRG-KSDD--VP S--IEVVHEMKS-FWSKLLSVKLITQRKEDNLTKA--ERGGLTE | 910 |
| GAD46167 | 841 | IPQAFIKDNSLDNRVLTRSDKNRG-KSDD--VP S--IEVVHEMKS-FWSKLLSVKLITQRKEDNLTKA--ERGGLTE | 909 |
| WP_018363470 | 850 | IPQAFIKDDSIDNRVLTSSAKNRG-KSDD--VP S--LGIVRARKA-EWVRLYKSGLISKRKEDNLTKA--ERGGLTE | 918 |
| WP_003043819 | 851 | VPQSFIKDDSIDNKVLTRSVENRG-KSDN--VP S--EEVVKKMKN-YWRQLLNAKLITQRKEDNLTKA--ERGGLSE | 919 |
| WP_006269658 | 841 | IPQAFIKDNSLDNRVLTRSDKNRG-KSDD--VP S--IEVVHEMKS-FWSKLLSVKLITQRKEDNLTKA--ERGGLTE | 909 |
| WP_048800889 | 841 | IPQAFIKDDSIDNRVLTSSAKNRG-KSDN--VP N--LEVVCDRKA-DWIRLREAGLISQRKEDNLTKA--ERGGLTE | 909 |
| WP_012767106 | 841 | VPQSFIKDDSIDNKILTRSDKNRG-KSDN--VP S--EEVVKKMKN-YWRQLLNAKLITQRKEDNLTKA--ERGGLSE | 909 |
| WP_014612333 | 841 | VPQSFIKDDSIDNKVLTRSDKNRG-KSDN--VP S--EEVVKKMKN-YWRQLLNAKLITQRKEDNLTKA--ERGGLSE | 909 |
| WP_015017095 | 841 | VPQSFIKDDSIDNKVLTRSDKNRG-KSDD--VP S--EEVVKKMKN-YWRQLLNAKLITQRKEDNLTKA--ERGGLSE | 909 |
| WP_015057649 | 841 | VPQSFIKDDSIDNKVLTRSDKNRG-KSDN--VP S--EEVVKKMKN-YWRQLLNAKLITQRKEDNLTKA--ERGGLSE | 909 |
| WP_048327215 | 841 | VPQSFIKDDSIDNKVLTRSDKNRG-KSDD--VP S--EEVVKKMKN-YWRQLLNAKLITQRKEDNLTKA--ERGGLSE | 909 |
| WP_049519324 | 841 | VPQSFIKDDSIDNKVLTRSDKNRG-KSDN--VP S--EEVVKKMKN-YWRQLLNAKLITQRKEDNLTKA--ERGGLSE | 909 |
| WP_012515931 | 841 | IPQSFIKNNSIDNKVLTSQGANRG-KLDN--VP S--EAIVRKMKG-YWQSLLRAGAISKQKEDNLTKA--ERGGLIQ | 909 |
| WP_021320964 | 841 | IPQSFIKNNSIDNKVLTSQGANRG-KLDN--VP S--EAIVRKMKG-YWQSLLRAGAISKQKEDNLTKA--ERGGLIQ | 909 |
| WP_037581760 | 841 | IPQSFIKNNSIDNKVLTSQGANRG-KLDN--VP S--EAIVRKMKG-YWQSLLRAGAISKQKEDNLTKA--ERGGLIQ | 909 |
| WP_004232481 | 849 | IPQAFIKDNSIDNRVLTSSAKNRG-KSDD--VP S--IEIVRNRKS-YWYKLYKSGLISKRKEDNLTKA--ERGGLTE | 917 |
| WP_009854540 | 850 | IPQAFIKDDSIDNRVLTSSAKNRG-KSDD--VP S--LDIVRARKA-EWVRLYKSGLISKRKEDNLTKA--ERGGLTE | 918 |
| WP_012962174 | 850 | IPQAFIKDDSIDNRVLTSSAKNRG-KSDD--VP S--LDIVHDRKA-DWIRLYKSGLISKRKEDNLTKA--ERGGLTE | 918 |
| WP_039695303 | 852 | IPQAFIKDDSIDNRVLTSSAKNRG-KSDD--VP S--LDIVRARKA-EWVRLYKSGLISKRKEDNLTKA--ERGGLTE | 920 |
| WP_014334983 | 849 | IPQAFIKDNSIDNKVLTSSAKNRG-KSDD--VP S--IEIVRNRRS-YWYKLYKSGLISKRKEDNLTKA--ERGGLTE | 917 |
| WP_003099269 | 842 | IPQSFIKDNSIDNIVLITQASNRG-KSDN--VP N--IETVNKMKS-FWYKQLKSGAISQRKFDHLTKA--ERGALSD | 910 |
| AHY15608 | 842 | IPQSFIKDNSIDNIVLITQASNRG-KSDN--VP N--IETVNKMKS-FWYKQLKSGAISQRKFDHLTKA--ERGALSD | 910 |
| AHY17476 | 842 | IPQSFIKDNSIDNIVLITQASNRG-KSDN--VP N--IETVNKMKS-FWYKQLKSGAISQRKFDHLTKA--ERGALSD | 910 |
| ESR09100 | | --------------------------------- -------------------------------------------- | |
| AGM98575 | 842 | IPQSFIKDNSIDNIVLITQASNRG-KSDN--VP N--IETVNKMKS-FWYKQLKSGAISQRKFDHLTKA--ERGALSD | 910 |
| ALF27331 | 842 | IPQAFIKDNSIDNRVLTSSKENRG-KSDD--VP S--KDVVRKMKS-YWSKLLSAKLITQRKEDNLTKA--ERGGLTD | 910 |
| WP_018372492 | 858 | VPRSYIKNDSFDNKVLITSKGNRK-KLDD--VP A--KEVVEKMEN-TWRRLHAAGLISDIKLSYLMKGe-----LTE | 923 |
| WP_045618028 | 845 | IPQAFIKDDSLDNRVLTSSKDNRG-KSDN--VP S--LEIVQKRKA-FWQQLLDSKLISERKENNLTKA--ERGGLDE | 913 |
| WP_045635197 | 844 | IPQAFIKDDSLDNRVLTSSKDNRG-KSDN--VP S--IEVVQKRKA-FWQQLLDSKLISERKENNLTKA--ERGGLDE | 912 |
| WP_002263549 | 842 | IPQAFIKDNSIDNRVLTSSKENRG-KSDD--VP S--KDVVRKMKS-YWSKLLSAKLITQRKEDNLTKA--ERGGLTD | 910 |
| WP_002263887 | 842 | IPQAFIKDNSIDNRVLTSSKENRG-KSDD--VP S--KDVVRKMKS-YWSKLLSAKLITQRKEDNLTKA--ERGGLTD | 910 |
| WP_002264920 | 842 | IPQAFIKDNSIDNRVLTSSKENRG-KSDD--VP S--KDVVRKMKS-YWSKLLSAKLITQRKEDNLTKG--ERGGLTD | 910 |
| WP_002269043 | 842 | IPQAFIKDNSIDNRVLTSSKENRG-KSDD--VP S--KDVVRKMKS-YWSKLLSAKLITQRKEDNLTKA--ERGGLTD | 910 |
| WP_002269448 | 842 | IPQAFIKDNSIDNRVLTSSKENRG-KSDD--VP S--EDVVRKMKS-YWSKLLSAKLITQRKEDNLTKA--ERGGLTD | 910 |
| WP_002271977 | 842 | IPQAFIKDNSIDNRVLTSSKENRG-KSDD--VP S--KDVVRKMKS-YWSKLLSAKLITQRKEDNLTKA--ERGGLTD | 910 |
| WP_002272766 | 842 | IPQAFIKDNSIDNRVLTSSKENRG-KSDD--VP S--KDVVRKMKP-YWSKLLSAKLITQRKEDNLTKA--ERGGLTD | 910 |
| WP_002273241 | 842 | IPQAFIKDNSIDNRVLTSSKENRG-KSDD--VP S--KDVVRKMKS-YWSKLLSAKLITQRKEDNLTKA--ERGGLTD | 910 |
| WP_002275430 | 842 | IPQAFIKDNSIDNRVLTSSKENRG-KSDD--VP S--KDVVRKMKP-YWSKLLSAKLITQRKEDNLTKA--ERGGLTD | 910 |
| WP_002276448 | 842 | IPQAFIKDNSIDNRVLTSSKENRG-KSDD--VP S--KDVVRKMKS-YWSKLLSAKLITQRKEDNLTKA--ERGGLTD | 910 |
| WP_002277050 | 847 | IPQAFIKDNSIDNRVLTSSKANRG-KSDD--VP S--EDVVNRMRP-FWNKLLSSGLISQRKYNNLTKK--E---LTP | 912 |
| WP_002277364 | 842 | IPQAFIKDNSIDNRVLTSSKENRG-KSDD--VP S--KNVVRKMKS-YWSKLLSAKLITQRKEDNLTKA--ERGGLTD | 910 |
| WP_002279025 | 842 | IPQAFIKDNSIDNRVLTSSKENRG-KSDD--VP S--KDVVRKMKP-YWSKLLSAKLITQRKEDNLTKA--ERGGLTD | 910 |
| WP_002279859 | 842 | IPQAFIKDNSIDNRVLTSSKENRG-KSDD--VP S--KDVVRKMKS-YWSKLLSAKLITQRKEDNLTKG--ERGGLTD | 910 |
| WP_002280230 | 842 | IPQAFIKDNSIDNRVLTSSKENRG-KSDD--VP S--KDVVRKMKS-YWSKLLSAKLITQRKEDNLTKA--ERGGLTD | 910 |
| WP_002281696 | 842 | IPQAFIKDNSIDNRVLTSSKENRG-KSDD--VP S--KNVVRKMKS-YWSKLLSAKLITQRKEDNLTKA--ERGGLTD | 910 |
| WP_002282247 | 847 | IPQAFIKDNSIDNRVLTSSKANRG-KSDD--VP S--EDVVNRMRP-FWNKLLSSGLISQRKYNNLTKK--E---LTL | 912 |
| WP_002282906 | 842 | IPQAFIKDNSIDNRVLTSSKENRG-KSDD--VP S--KDVVRKMKS-YWSKLLSAKLITQRKEDNLTKA--ERGGLTD | 910 |
| WP_002283846 | 842 | IPQAFIKDNSIDNRVLTSSKENRG-KSDD--VP S--KNVVRKMKS-YWSKLLSAKLITQRKEDNLTKA--ERGGLTD | 910 |
| WP_002287255 | 842 | IPQAFIKDNSIDNRVLTSSKENRG-KSDD--VP S--KNVVRKMKS-YWSKLLSAKLITQRKEDNLTKA--ERGGLTD | 910 |
| WP_002288990 | 842 | IPQAFIKDNSIDNRVLTSSKENRG-KSDD--VP S--KDVVRKMKS-YWSKLLSAKLITQRKEDNLTKA--ERGGLTD | 910 |
| WP_002289641 | 842 | IPQAFIKDNSIDNRVLTSSKENRG-KSDD--VP S--KDVVRKMKS-YWSKLLSAKLITQRKEDNLTKA--ERGGLTD | 910 |
| WP_002290427 | 842 | IPQAFIKDNSIDNRVLTSSKENRG-KSDD--VP S--KDVVRKMKS-YWSKLLSAKLITQRKEDNLTKG--ERGGLTD | 910 |
| WP_002295753 | 842 | IPQAFIKDNSIDNRVLTSSKENRG-KSDD--VP S--KDVVRKMKS-YWSKLLSAKLITQRKEDNLTKA--ERGGLTD | 910 |
| WP_002296423 | 842 | IPQAFIKDNSIDNRVLTSSKENRG-KSDD--VP S--KNVVRKMKS-YWSKLLSAKLITQRKEDNLTKA--ERGGLTD | 910 |
| WP_002304487 | 856 | IPQAFIKDNSIDNRVLTRSDKNRG-KSDD--VP S--EEVVHKMKP-FWSKLLSAKLITQRKEDNLTKA--ERGGLTD | 924 |
| WP_002305844 | 842 | IPQAFIKDNSIDNRVLTSSKENRG-KSDD--VP S--KDVVRKMKS-YWSKLLSAKLITQRKEDNLTKA--ERGGLTD | 910 |
| WP_002307203 | 842 | IPQAFIKDNSIDNRVLTSSKENRG-KSDD--VP S--KDVVRKMKS-YWSKLLSAKLITQRKEDNLTKA--ERGGLTD | 910 |
| WP_002310390 | 842 | IPQAFIKDNSIDNRVLTSSKENRG-KSDD--VP S--KDVVRKMKS-YWSKLLSAKLITQRKEDNLTKG--ERGGLTD | 910 |
| WP_002352408 | 842 | IPQAFIKDNSIDNRVLTSSKENRG-KSDD--VP S--KDVVRKMKS-YWSKLLSAKLITQRKEDNLTKA--ERGGLTD | 910 |
| WP_012997688 | 842 | IPQAFIKDNSIDNRVLTSSKENRG-KSDD--VP S--KNVVRKMKS-YWSKLLSAKLITQRKEDNLTKA--ERGGLTD | 910 |
| WP_014677909 | 842 | IPQAFIKDNSIDNRVLTSSKENRG-KSDD--VP S--KDVVRKMKS-YWSKLLSAKLITQRKEDNLTKA--ERGGLTD | 910 |
| WP_019312892 | 842 | IPQAFIKDNSIDNRVLTSSKENRG-KSDD--VP S--KNVVRKMKS-YWSKLLSAKLITQRKEDNLTKA--ERGGLTD | 910 |
| WP_019313659 | 842 | IPQAFIKDNSIDNRVLTSSKENRG-KSDD--VP S--KDVVRKMKS-YWSKLLSAKLITQRKEDNLTKA--ERGGLTD | 910 |
| WP_019314093 | 842 | IPQAFIKDNSIDNRVLTSSKENRG-KSDD--VP S--KDVVRKMKS-YWSKLLSAKLITQRKEDNLTKA--ERGGLTD | 910 |
| WP_019315370 | 842 | IPQAFIKDNSIDNRVLTSSKENRG-KSDD--VP S--KDVVRKMKP-YWSKLLSAKLITQRKEDNLTKA--ERGGLTD | 910 |
| WP_019803776 | 842 | IPQAFIKDNSIDNRVLTSSKENRG-KSDD--VP S--KDVVRKMKS-YWSKLLSAKLITQRKEDNLTKA--ERGGLTD | 910 |
| WP_019805234 | 842 | IPQAFIKDNSIDNRVLTSSKENRG-KSDD--VP S--KDVVRKMKS-YWSKLLSAKLITQRKEDNLTKG--ERGGLTD | 910 |
| WP_024783594 | 842 | IPQAFIKDNSIDNRVLTSSKENRG-KSDD--VP S--KDVVRKMKS-YWSKLLSAKLITQRKEDNLTKA--ERGGLTD | 910 |
| WP_024784288 | 847 | IPQAFIKDNSIDNRVLTSSKANRG-KSDD--VP S--EDVVNRMRP-FWNKLLSSGLISQRKYNNLTKK--E---LTL | 912 |
| WP_024784666 | 842 | IPQAFIKDNSIDNRVLTSSKENRG-KSDD--VP S--KNVVRKMKS-YWSKLLSAKLITQRKEDNLTKA--ERGGLTD | 910 |
| WP_024784894 | 842 | IPQAFIKDNSIDNRVLTSSKENRG-KSDD--VP S--KDVVRKMKS-YWSKLLSAKLITQRKEDNLTKA--ERGGLTD | 910 |
| WP_024786433 | 847 | IPQAFIKDNSIDNRVLTSSKANRG-KSDD--VP S--EDVVNRMRP-FWNKLLSSGLISQRKYNNLTKK--E---LTL | 912 |
| WP_049473442 | 842 | IPQAFIKDNSIDNRVLISSKENRG-KSDD--VP S--KDVVRKMKP-YWSKLLSAKLITQRKFDNLTKA--ERGGLTD | 910 |
| WP_049474547 | 842 | IPQAFIKDNSIDNRVLISSKENRG-KSDD--VP S--KDVVRKMKS-YWSKLLSAKLITQRKFDNLTKA--ERGGLTD | 910 |
| EMC03581 | 835 | IPQAFIKDNSIDNRVLISSKENRG-KSDD--VP S--KNVVRKMKS-YWSKLLSAKLITQRKFDNLTKA--ERGGLTD | 903 |
| WP_000428612 | 847 | VPQAFIKDDSLDNRVLISLKDNRG-KSDN--VP S--LEVVEKMKT-FWQQLLDSKLISYRKFNNLTKA--ERGGLDE | 915 |
| WP_000428613 | 845 | VPQAFIKDDSLDNRVLISLKDNRG-KSDN--VP S--IEVVQKRKA-FWQQLLDSKLISERKFNNLTKA--ERGGLDE | 913 |
| WP_049523028 | 840 | IPQAFIKDDSLDNRVLISSKDNRG-KSDN--VP S--LEIVEKMKG-FWQQLLDSKLISERKFNNLTKA--ERGGLDE | 908 |
| WP_003107102 | 811 | IPQSFIKDNSIDNIVLISQESNRG-KSDN--VP Y--IAIVNKMKS-YWQHQLKSGAISQRKFDNLTKA--ERGGLSE | 879 |
| WP_054279288 | 843 | IPRSFIKDDSIDNKVLIRSEHNRG-KIDN--VP S--IEVVKRMKP-YWQKLLDTKVISQRKEDNLTKA--ERGGLQE | 911 |
| WP_049531101 | 845 | IPQAFIKDDSLDNRVLISSKDNRG-KSDN--VP S--LEVVQKRKA-FWQQLLESKLISERKFNNLTKA--ERGGLNE | 913 |
| WP_049538452 | 845 | IPQAFIKDDSLDNRVLISSKENRG-KSDN--VP C--LEVVDKMKV-FWQQLLDFKLISYRKFNNLTKA--ERGGLDE | 913 |
| WP_049549711 | 845 | IPQAFIKDDSLDNRVLISSKDNRG-KSDN--VP S--LEVVQKRKA-FWQQLLDSKLISERKFNNLTKAerERDGLNE | 915 |
| WP_007896501 | 847 | IPQSFIKDNSIDNLVLITQKANRG-KSDN--VP S--IEVVRDMKDrVWRRQLANGAISRQKFDHLTKA--ERGGLAD | 916 |
| EFR44625 | 799 | IPQSFIKDNSIDNLVLITQKANRG-KSDN--VP S--IEVVRDMKDrVWRRQLANGAISRQKFDHLTKA--ERGGLAD | 868 |
| WP_002897477 | 844 | IPQAFIKDDSIDNRVLISSKDNRG-KSDN--VP S--LEVVQKRKA-FWQQLLDSKLISERKFNNLTKA--ERGGLDE | 912 |
| WP_002906454 | 844 | IPQAFIKDDSLDNRVLISSKDNRG-KSDN--VP S--IEVVQKRKA-FWQQLLDSKLISERKFNNLTKA--KRGGLDE | 912 |
| WP_009729476 | 845 | IPQAFIKDDSLDNRVLISSKDNRG-KSDN--VP S--LEVVDKMKV-FWQQLLDSKLISYRKFNNLTKA--ERGGLNE | 913 |
| CQR24647 | 844 | IPQSFIKDNSLDNRVLINSKSNRG-KSDN--VP S--NEVVKRMKG-FWLKQLDAKLISQRKEDNLTKA--ERGGLSA | 912 |
| WP_000066813 | 847 | IPQAFIKDDSLDNRVLISSKDNRG-KSDN--VP S--LEVVEKMKA-FWQQLLDSKLISERKFNNLTKAerERGGLNE | 917 |
| WP_009754323 | 845 | IPQAFIKDDSLDNRVLISSKDNRG-KSDN--VP S--LEVVKKRKA-FWQQLLDSKLISERKFNNLTKA--ERGGLDE | 913 |
| WP_044674937 | 844 | IPQAFIKDDSLDNKVLIKSAKNRG-KSDD--VP S--LEIVHKKKN-FWKQLLDSQLISQRKFDNLTKA--ERGGLTN | 912 |
| WP_044676715 | 846 | IPQAFIKDDSLDNKVLIKSAKNRG-KSDD--VP S--LEIVHKKKN-FWKQLLDSQLISQRKFDNLTKA--ERGGLTN | 914 |
| WP_044680361 | 846 | IPQAFIKDDSLDNKVLIKSAKNRG-KSDD--VP S--LEIVHKKKN-FWKQLLDSQLISQRKFDNLTKA--ERGGLTN | 914 |
| WP_044681799 | 844 | IPQAFIKDDSLDNKVLIKSAKNRG-KSDD--VP S--LEIVHKKKN-FWKQLLDSQLISQRKFDNLTKA--ERGGLTN | 912 |
| WP_049533112 | 841 | IPQAFIKDDSFDNRVLISSSENRG-KSDN--VP S--IEVVRARKA-DWMRLRKAGLISQRKEDNLTKA--ERGGLTE | 909 |
| WP_029090905 | 824 | LPQSYIKDNSIENLALVKKVENQR-KKDSllLN S---SIINQNYS-RWEQLKNAGLIGEKKFRNLTRTk-----ITD | 890 |
| WP_006506696 | 850 | VPQSLVKDDSEDNRVLVVPSENQR-KLDDlvVP ---FDIRDKMYR-FWKLLFDHELISPKKFYSLTKTe-----YTE | 916 |
| AIT42264 | 842 | VPQSFLKDDSIDNKVLIRSDKNRG-KSDN--VP S--EEVVKKMKN-YWRQLLNAKLITQRKFDNLTKA--ERGGLSE | 910 |
| WP_034440723 | 849 | IPRSFITDNSFDNLVLISSIVNRG-KLDN--VP Sp--DIVRQQKG-FWKQLLRAGLMSQRKENNLTKGk-----LTD | 914 |
| AKQ21048 | 842 | VPQSFLKDDSIDNKVLIRSDKNRG-KSDN--VP S--EEVVKKMKN-YWRQLLNAKLITQRKFDNLTKA--ERGGLSE | 910 |
| WP_004636532 | 846 | IPQSFTIDNSIDNKVLVSRTKNQGnKSDD--VP S--INIVHKMKP-FWRQLHKAGLISDRKFKNLTKA--EHGGLTE | 915 |
| WP_002364836 | 853 | IPQSFMKDDSLDNLVLVGSTENRG-KSDD--VP S--KEVVKDMKA-YWEKLYAAGLISQRKFQRLTKG--EQGGLTL | 921 |
| WP_016631044 | 804 | IPQSFMKDDSLDNLVLVGSTENRG-KSDD--VP S--KEVVKDMKA-YWEKLYAAGLISQRKFQRLTKG--EQGGLTL | 872 |
| EMS75795 | 589 | IPRSFIVDNSIDNKVLVSSKENRL-KMDD--VP D--QKVVIRMRR-YWEKLLRANLISERKFAYLTKLe-----LTP | 654 |
| WP_002373311 | 853 | IPQSFMKDDSLDNLVLVGSTENRG-KSDD--VP S--KKVVKKMKA-YWEKLYAAGLISQRKFQRLTKG--EQGGLTL | 921 |
| WP_002378009 | 853 | IPQSFMKDDSLDNLVLVGSTENRG-KSDD--VP S--KEVVKDMKA-YWEKLYAAGLISQRKFQRLTKG--EQGGLTL | 921 |
| WP_002407324 | 853 | IPQSFMKDDSLDNLVLVGSTENRG-KSDD--VP S--KEVVKDMKA-YWEKLYAAGLISQRKFQRLTKG--EQGGLTL | 921 |
| WP_002413717 | 853 | IPQSFMKDDSLDNLVLVGSTENRG-KSDD--VP S--KEVVKDMKA-YWEKLYAAGLISQRKFQRLTKG--EQGGLTL | 921 |
| WP_010775580 | 855 | IPQSFMKDDSLDNLVLVGSTENRG-KSDD--VP S--KEVVKKMKA-YWEKLYAAGLISQRKFQRLTKG--EQGGLTL | 923 |
| WP_010818269 | 853 | IPQSFMKDDSLDNLVLVGSTENRG-KSDD--VP S--KEVVKDMKA-YWEKLYAAGLISQRKFQRLTKG--EQGGLTL | 921 |
| WP_010824395 | 853 | IPQSFMKDDSLDNLVLVGSTENRG-KSDD--VP S--KEVVKDMKA-YWEKLYAAGLISQRKFQRLTKG--EQGGLTL | 921 |
| WP_016622645 | 853 | IPQSFMKDDSLDNLVLVGSTENRG-KSDD--VP S--KEVVKDMKA-YWEKLYAAGLISQRKFQRLTKG--EQGGLTL | 921 |
| WP_033624816 | 853 | IPQSFMKDDSLDNLVLVGSTENRG-KSDD--VP S--KEVVKKMKA-YWEKLYAAGLISQRKFQRLTKG--EQGGLTL | 921 |
| WP_033625576 | 853 | IPQSFMKDDSLDNLVLVGSTENRG-KSDD--VP S--KEVVKKMKA-YWEKLYAAGLISQRKFQRLTKG--EQGGLTL | 921 |
| WP_033789179 | 853 | IPQSFMKDDSLDNLVLVGSTENRG-KSDD--VP S--KEVVKKMKA-YWEKLYAAGLISQRKFQRLTKG--EQGGLTL | 921 |
| WP_002310644 | 853 | IPRSFTIDNSIDNKVLVSSKENRL-KKDD--VP S--EKVVKKMRS-FWYDLYSSKLISKRKLDNLTKIk-----LTE | 918 |
| WP_002312694 | 854 | IPRSFTIDNSIDNKVLVSSKENRL-KKDD--VP S--EKVVKKMRS-FWYDLYSSKLISKRKLDNLTKIk-----LTE | 919 |
| WP_002314015 | 854 | IPRSFTIDNSIDNKVLVSSKENRL-KKDD--VP S--EKVVKKMRS-FWYDLYSSKLISKRKLDNLTKIk-----LTE | 919 |
| WP_002320716 | 854 | IPRSFTIDNSIDNKVLVSSKENRL-KKDD--VP S--EKVVKKMRS-FWYDLYSSKLISKRKLDNLTKIk-----LTE | 919 |
| WP_002330729 | 853 | IPRSFTIDNSIDNKVLVSSKENRL-KKDD--VP S--EKVVKKMRS-FWYDLYSSKLISKRKLDNLTKIk-----LTE | 918 |
| WP_002335161 | 854 | IPRSFTIDNSIDNKVLVSSKENRL-KKDD--VP S--EKVVKKMRS-FWYDLYSSKLISKRKLDNLTKIk-----LTE | 919 |
| WP_002345439 | 854 | IPRSFTIDNSIDNKVLVSSKENRL-KKDD--VP S--EKVVKKMRS-FWYDLYSSKLISKRKLDNLTKIk-----LTE | 919 |
| WP_034867970 | 845 | IPRSFIVDNSIDDKVLVASKQNQK-KRDD--VP K--KQIVNEQRI-FWNQLKEAKLISTKKYAYLTKIe-----LTP | 910 |
| WP_047937432 | 854 | IPRSFTIDNSIDNKVLVSSKENRL-KKDD--VP S--EKVVKKMRS-FWYDLYSSKLISKRKLDNLTKIk-----LTE | 919 |
| WP_010720994 | 845 | IPRSFIVDNSIDNKVLVASKQNQK-KRDD--VP K--KQIVNEQRI-FWNQLKEAKLISPKKYAYLTKIe-----LTP | 910 |
| WP_010737004 | 845 | IPRSFIVDNSIDNKVLVASKQNQK-KRDD--VP K--KQIVNEQRI-FWNQLKEAKLISPKKYAYLTKIe-----LTP | 910 |
| WP_034700478 | 845 | IPRSFIVDNSIDNKVLVASKQNQK-KRDD--VP N--KQIVNEQRI-FWNQLKEAKLISPKKYAYLTKIe-----LTP | 910 |
| WP_007209003 | 846 | IPQSFLIDNSIDNRVLITSKSNRG-KSDN--VP S--EEVVRKMDR-FWRKLLNAKLISERKYTNLTKKe-----LTE | 911 |
| WP_023519017 | 839 | IPRSFIVDNSLDNKVLVSSKVNRG-KLDN--AP D--PLVVKRMRS-HWEKLHQAKLISDKKLANLTKQn-----LTE | 904 |
| WP_010770040 | 846 | VPQSFTTDNSLDNRVLVSSKENRG-KKDD--VP S--KEVVQKNIT-LWETLKNSNLISQKKYDNLTKG--LRGGLTE | 914 |
| WP_048604708 | 843 | IPQSFIVDNSLDNRVLVSSSKNRG-KLDD--VP S--KEVVKKMRA-FWESLYRSGLISKKKEDNLVKA--ESGGLSE | 911 |
| WP_010750235 | 848 | IPRSFIVDHSLDNKVLVSSKENRL-KKDD--VP D--SKVVKRMKA-YWEKLLRANLISERKESYLIKLe-----LTD | 913 |
| AII16583 | 881 | VPQSFLKDDSIDNKVLIRSDKNRG-KSDN--VP S--EEVVKKMKN-YWRQLLNAKLITQRKEDNLTKA--ERGGLSE | 949 |
| WP_029073316 | 861 | VPQSLLKDDSIDNKVLVLSSENQR-KLDDlvIP ---EMIRNKMFG-FWNKLYENKIISPKKFYSLIKSe-----YSD | 927 |
| WP_031589969 | 861 | VPQSLLKDDSIDNKVLVLSSENQR-KLDDlvIP ---SSIRNKMYG-FWEKLENNKIISPKKFYSLIKTe-----FNE | 927 |
| KDA45870 | 834 | IPQSFLKDDSIENKVLTIKKENVR-KTNG--LP S--EAVIQKMGS-FWKKLLDAGAMTNKKYDNLRRNl--HGGLNE | 902 |
| WP_039099354 | 857 | LPQSFIKDNSLDNRVLVSQRMNRS-KADQ--VP S--VELGQKMQI-QWEQMLRAGLITKKKYDNLTLNp-------- | 923 |
| AKP02966 | 859 | LPRTYIPDDSLENKALVLAKENQR-KADDllLN S---NVIDKNLE-RWTYMLNNNMMGLKKEKNLTRRv-----ITD | 925 |
| WP_010991369 | 845 | VPQSFITDNSIDNLVLISSAGNRE-KGDD--VP P--LEIVRKRKV-FWEKLYQGNLMSKRKFDYLTKA--ERGGLTE | 913 |
| WP_033838504 | 845 | VPQSFITDNSIDNLVLISSAGNRE-KGDD--VP P--LEIVRKRKV-FWEKLYQGNLMSKRKFDYLTKA--ERGGLTE | 913 |
| EHN60060 | 848 | VPQSFITDNSIDNLVLISSAGNRE-KGDD--VP P--LEIVRKRKV-FWEKLYQGNLMSKRKFDYLTKA--ERGGLTE | 916 |
| EFR89594 | 614 | VPQSFITDNSIDNLVLISSAGNRE-KGND--VP P--LEIVQKRKV-FWEKLYQGNLMSKRKFDYLTKA--ERGGLTE | 682 |
| WP_038409211 | 845 | IPQSFITDNSIDNRVLVSSTANRE-KGDN--VP L--LEVVRKRKA-FWEKLYQAKLMSKRKFDYLTKA--ERGGLTE | 913 |
| EFR95520 | 464 | IPQSFITDNSIDNRVLVSSTANRE-KGDN--VP L--LEVVRKRKA-FWEKLYQAKLMSKRKFDYLTKA--ERGGLTE | 532 |
| WP_003723650 | 845 | VPQSFITDNSIDNLVLISSAGNRE-KGGD--VP P--LEIVRKRKV-FWEKLYQGNLMSKRKFDYLTKA--ERGGLTE | 913 |
| WP_003727705 | 845 | VPQSFITDNSIDNLVLISSAGNRE-KGGD--VP P--LEIVRKRKV-FWEKLYQGNLMSKRKFDYLTKA--ERGGLTE | 913 |
| WP_003730785 | 845 | VPQSFITDNSIDNLVLISSAGNRE-KGGD--VP P--LEIVRKRKV-FWEKLYQGNLMSKRKFDYLTKA--ERGGLTE | 913 |
| WP_003733029 | 845 | VPQSFITDNSVDNLVLISSAGNRE-KGDN--VP P--LEIVQKRKI-FWEKLYQGNLMSKRKFDYLTKA--ERGGLTE | 913 |
| WP_003739838 | 845 | VPQSFITDNSIDNLVLISSAGNRE-KGDD--VP P--LEIVRKRKV-FWEKLFQGNLMSKRKFDYLTKA--ERGGLTE | 913 |
| WP_014601172 | 845 | VPQSFITDNSIDNLVLTSSAGNRE-KGGD--VP P--LEIVRKRKV-FWEKLYQGNLMSKRKFDYLTKA--ERGGLTD | 913 |
| WP_023548323 | 845 | VPQSFITDNSIDNLVLTSSAGNRE-KGDN--VP P--LEIVQKRKI-FWEKLYQGNLMSKRKFDYLTKA--ERGGLTE | 913 |
| WP_031665337 | 845 | VPQSFITDNSIDNLVLTSSAGNRE-KGGD--VP P--LEIVRKRKV-FWEKLYQGNLMSKRKFDYLTKA--ERGGLTE | 913 |
| WP_031669209 | 845 | VPQSFITDNSVDNLVLTSSAGNRE-KGDN--VP P--LEIVQKRKI-FWEKLYQGNLMSKRKFDYLTKA--ERGGLTE | 913 |
| WP_033920898 | 845 | VPQSFITDNSIDNLVLTSSAGNRE-KGDN--VP P--LEIVQKRKI-FWEKLYQGNLMSKRKFDYLTKA--ERGGLTE | 913 |
| AKI42028 | 848 | VPQSFITDNSIDNLVLTSSAGNRE-KGGD--VP P--LEIVRKRKV-FWEKLYQGNLMSKRKFDYLTKA--ERGGLTD | 916 |
| AKI50529 | 848 | VPQSFITDNSIDNLVLTSSAGNRE-KGDN--VP P--LEIVQKRKI-FWEKLYQGNLMSKRKFDYLTKA--ERGGLTE | 916 |
| EFR83390 | 293 | VPQSFITDNSIDNLVLTSSAGNRE-KGDD--VP P--LEIVRKRKV-FWEKLYQGNLMSKRKFDYLTKA--ERGGLTE | 361 |
| WP_046323366 | 845 | VPQSFITDNSIDNRVLASSAANRE-KGDN--VP S--LEVVRKRKV-YWEKLYQAKLMSKRKFDYLTKA--ERGGLTE | 913 |
| AKE81011 | 858 | VPQSFLKDDSIDNKVLTRSDKNRG-KSDN--VP S--EEVVKKMKN-YWRQLLNAKLITQRKFDNLTKA--ERGGLSE | 926 |
| CUO82355 | 854 | VPQSLVKDDSEDNRVLVLPSENQR-KLDDlvVP ---FDIRDKMYR-FWKLLFDHELISPKKFYSLIKTe-----YTE | 920 |
| WP_033162887 | 856 | LPQSLIKDDSFDNRVLVLPEENQW-KLDSetVP ---FEIRNKMIG-FWQMLHENGLMSNKKFFSLIRTd-----FSD | 922 |
| AGZ01981 | 875 | VPQSFLKDDSIDNKVLTRSDKNRG-KSDN--VP S--EEVVKKMKN-YWRQLLNAKLITQRKFDNLTKA--ERGGLSE | 943 |
| AKA60242 | 842 | VPQSFLKDDSIDNKVLTRSDKNRG-KSDN--VP S--EEVVKKMKN-YWRQLLNAKLITQRKFDNLTKA--ERGGLSE | 910 |
| AKS40380 | 842 | VPQSFLKDDSIDNKVLTRSDKNRG-KSDN--VP S--EEVVKKMKN-YWRQLLNAKLITQRKFDNLTKA--ERGGLSE | 910 |
| 4UN5_B | 846 | VPQSFLKDDSIDNKVLTRSDKNRG-KSDN--VP S--EEVVKKMKN-YWRQLLNAKLITQRKFDNLTKA--ERGGLSE | 914 |
| WP_010922251 | 911 | [chemical structure] | 981 |
| WP_039695303 | 921 | AD KAGFIKRQLVETRQITKHVAQILDARFNTEHDENDKVIR--DVKVITLKSNLVSQFRKDF EFYKVREINDY | 991 |
| WP_045635197 | 913 | RD KVGFIKRQLVETRQITKHVAQILDARYNTEVNEKDKKNR--TVKIITLKSNLVSNFRKEF RLYKVREINDY | 983 |
| 5AXW_A | 633 | RD QKDFINRNLVDTRYATRGLMNLLRSYFR---------VNnlDVKVKSINGGFTSFLRRKW KFKKERNKGYK | 702 |
| WP_009880683 | 595 | LD KAGFIKRQLVETRQITKHVAQILDSRMNIKYDENDKLIR--EVRVITLKSKLVSDFRKDF QFYKVREINNY | 665 |
| WP_010922251 | 911 | LD KAGFIKRQLVETRQITKHVAQILDSRMNIKYDENDKLIR--EVKVITLKSKLVSDFRKDF QFYKVREINNY | 981 |
| WP_011054416 | 911 | LD KVGFIKRQLVETRQITKHVAQILDSRMNIKYDENDKLIR--EVRVITLKSKLVSDFRKDF QFYKVREINNY | 981 |
| WP_011284745 | 911 | LD KAGFIKRQLVETRQITKHVAQILDSRMNIKYDENDKLIR--EVKVITLKSKLVSDFRKDF QFYKVREINNY | 981 |
| WP_011285506 | 911 | LD KAGFIKRQLVETRQITKHVAQILDSRMNIKYDENDKLIR--EVKVITLKSKLVSDFRKDF QFYKVREINNY | 981 |
| WP_011527619 | 911 | LD KAGFIKRQLVETRQITKHVAQILDSRMNIKYDENDKLIR--EVKVITLKSKLVSDFRKDF QFYKVREINNY | 981 |
| WP_012560673 | 911 | LD KAGFIKRQLVETRQITKHVAQILDSRMNIKYDENDKLIR--EVRVITLKSKLVSDFRKDF QFYKVREINNY | 981 |
| WP_014407541 | 910 | LD KAGFIKRQLVETRQITKHVAQILDSRMNIKYDENDKLIR--EVKVITLKSKLVSDFRKDF QFYKVREINNY | 980 |
| WP_020905136 | 911 | LD KAGFIKRQLVETRQITKHVAQILDSRMNIKYDENDKLIR--EVKVITLKSKLVSDFRKDF QFYKVREINNY | 981 |
| WP_023080005 | 910 | LD KAGFIKRQLVETRQITKHVAQILDSRMNIKYDENDKLIR--EVKVITLKSKLVSDFRKDF QFYKVREINNY | 980 |
| WP_023610282 | 910 | LD KAGFIKRQLVETRQITKHVAQILDSRMNIKYDENDKLIR--EVKVITLKSKLVSDFRKDF QFYKVREINNY | 980 |
| WP_030125963 | 911 | LD KAGFIKRQLVETRQITKHVAQILDSRMNIKYDENDKLIR--EVKVITLKSKLVSDFRKDF QFYKVREINNY | 981 |
| WP_030126706 | 911 | LD KAGFIKRQLVETRQITKHVAQILDSRMNIKYDENDKLIR--EVKVITLKSKLVSDFRKDF QFYKVREINNY | 981 |
| WP_031488318 | 911 | LD KAGFIKRQLVETRQITKHVAQILDSRMNIKYDENDKLIR--EVKVITLKSKLVSDFRKDF QFYKVREINNY | 981 |
| WP_032460140 | 911 | LD KAGFIKRQLVETRQITKHVAQILDSRMNIKYDENDKLIR--EVRVITLKSKLVSDFRKDF QFYKVREINNY | 981 |
| WP_032461047 | 911 | LD KAGFIKRQLVETRQITKHVAQILDSRMNIKYDENDKLIR--EVRVITLKSKLVSDFRKDF QFYKVREINNY | 981 |
| WP_032462016 | 911 | LD KAGFIKRQLVETRQITKHVAQILDSRMNIKYDENDKLIR--EVKVITLKSKLVSDFRKDF QFYKVREINNY | 981 |
| WP_032462936 | 911 | LD KAGFIKRQLVETRQITKHVAQILDSRMNIKYDENDKLIR--EVRVITLKSKLVSDFRKDF QFYKVREINNY | 981 |
| WP_032464890 | 911 | LD KAGFIKRQLVETRQITKHVAQILDSRMNIKYDENDKLIR--EVKVITLKSKLVSDFRKDF QFYKVREINNY | 981 |
| WP_033888930 | 736 | LD KAGFIKRQLVETRQITKHVAQILDSRMNIKYDENDKLIR--EVKVITLKSKLVSDFRKDF QFYKVREINNY | 806 |
| WP_038431314 | 911 | LD KAGFIKRQLVETRQITKHVAQILDSRMNIKYDENDKLIR--EVKVITLKSKLVSDFRKDF QFYKVREINNY | 981 |
| WP_038432938 | 910 | LD KAGFIKRQLVETRQITKHVAQILDSRMNIKYDENDKLIR--EVKVITLKSKLVSDFRKDF QFYKVREINNY | 980 |
| WP_038434062 | 911 | LD KAGFIKRQLVETRQITKHVAQILDSRMNIKYDENDKLIR--EVKVITLKSKLVSDFRKDF QFYKVREINNY | 981 |
| BAQ51233 | 822 | LD KAGFIKRQLVETRQITKHVAQILDSRMNIKYDENDKLIR--EVKVITLKSKLVSDFRKDF QFYKVREINNY | 892 |
| KGE60162 | 86 | LD KVGFIKRQLVETRQITKHVAQILDSRMNIKYDENDKLIR--EVRVITLKSKLVSDFRKDF QFYKVREINNY | 156 |
| KGE60856 | | -- ------------------------------------------------------------ ----------- | |
| WP_002989955 | 911 | LD KAGFIKRQLVETRQITKHVAQILDSRMNIKYDENDKLIR--EVKVITLKSKLVSDFRKDF QFYKVREINNY | 981 |
| WP_003030002 | 910 | ED KAGFIKRQLVETRQITKHVAQILDERFNIEFDGNKRRIR--NVKIITLKSNLVSNFRKEF ELYKVREINDY | 980 |
| WP_003065552 | 921 | AD KAGFIKRQLVETRQITKHVAQILDARFNTESDENDKVIR--DVKVITLKSNLVSQFRKDF EFYKVREINDY | 991 |
| WP_001040076 | 916 | DD KARFIQRQLVETRQITKHVARILDERFNNELDSKGRRIR--KVKIVTLKSNLVSNFRKEF VFYKIREVNNY | 986 |
| WP_001040078 | 916 | DD KARFIQRQLVETRQITKHVARILDERFNNELDSKGRRIR--KVKIVTLKSNLVSNFRKEF GFYKIREVNDY | 986 |
| WP_001040080 | 916 | DD KARFIQRQLVETRQITKHVARILDERFNNELDSKGRRIR--KVKIVTLKSNLVSNFRKEF GFYKIREVNNY | 986 |
| WP_001040081 | 916 | DD KARFIQRQLVETRQITKHVARILDERFNNELDSKGRRIR--KVKIVTLKSNLVSNFRKEF GFYKIREVNNY | 986 |
| WP_001040083 | 916 | DD KARFIQRQLVETRQITKHVARILDERFNNELDSKGRRIR--KVKIVTLKSNLVSNFRKEF GFYKIREVNNY | 986 |
| WP_001040085 | 916 | DD KARFIQRQLVETRQITKHVARILDERFNNELDSKGRRIR--KVKIVTLKSNLVSNFRKEF GFYKIREVNNY | 986 |
| WP_001040087 | 916 | DD KARFIQRQLVETRQITKHVARILDERFNNELDSKGRRIR--KVKIVTLKSNLVSNFRKEF GFYKIREVNNY | 986 |
| WP_001040088 | 916 | DD KARFIQRQLVETRQITKHVARILDERFNNELDSKGRRIR--KVKIVTLKSNLVSNFRKEF GFYKIREVNNY | 986 |
| WP_001040089 | 916 | DD KARFIQRQLVETRQITKHVARILDERFNNELDSKGRRIR--KVKIVTLKSNLVSNFRKEF GFYKIREVNNY | 986 |
| WP_001040090 | 916 | DD KARFIQRQLVETRQITKHVARILDERFNNELDSKGRRIR--KVKIVTLKSNLVSNFRKEF GFYKIREVNNY | 986 |
| WP_001040091 | 916 | DD KARFIQRQLVETRQITKHVARILDERFNNELDSKGRRIR--KVKIVTLKSNLVSNFRKEF GFYKIREVNNY | 986 |
| WP_001040092 | 916 | DD KAGFIQRQLVETRQITKHVARILDERFNNKVDDNNKPIR--KVKIVTLKSNLVSNFRKEF GFYKIREVNNY | 986 |
| WP_001040094 | 916 | DD KARFIQRQLVETRQITKHVARILDERFNNELDSKGRRIR--KVKIVTLKSNLVSNFRKEF GFYKIREVNNY | 986 |
| WP_001040095 | 916 | DD KARFIQRQLVETRQITKHVARILDERFNNELDSKGRRIR--KVKIVTLKSNLVSNFRKEF GFYKIREVNNY | 986 |
| WP_001040096 | 916 | DD KARFIQRQLVETRQITKHVARILDERFNNELDSKGRRIR--KVKIVTLKSNLVSNFRKEF GFYKIREVNNY | 986 |
| WP_001040097 | 916 | DD KARFIQRQLVETRQITKHVARILDERFNNELDSKGRRIR--KVKIVTLKSNLVSNFRKEF GFYKIREVNNY | 986 |
| WP_001040098 | 916 | DD KARFIQRQLVETRQITKHVARILDERFNNELDSKGRRIR--KVKIVTLKSNLVSNFRKEF GFYKIREVNNY | 986 |
| WP_001040099 | 916 | DD KARFIQRQLVETRQITKHVARILDERFNNELDSKGRRIR--KVKIVTLKSNLVSNFRKEF GFYKIREVNNY | 986 |
| WP_001040100 | 916 | DD KARFIQRQLVETRQITKHVARILDERFNNELDSKGRRIR--KVKIVTLKSNLVSNFRKEF GFYKIREVNNY | 986 |
| WP_001040104 | 916 | DD KARFIQRQLVETRQITKHVARILDERFNNELDSKGRRIR--KVKIVTLKSNLVSNFRKEF GFYKIREVNNY | 986 |
| WP_001040105 | 916 | DD KARFIQRQLVETRQITKHVARILDERFNNELDSKGRRIR--KVKIVTLKSNLVSNFRKEF GFYKIREVNNY | 986 |
| WP_001040106 | 916 | DD KARFIQRQLVETRQITKHVARILDERFNNELDSKGRRIR--KVKIVTLKSNLVSNFRKEF GFYKIREVNDY | 986 |
| WP_001040107 | 916 | DD KARFIQRQLVETRQITKHVARILDERFNNELDSKGRRIR--KVKIVTLKSNLVSNFRKEF GFYKIREVNDY | 986 |
| WP_001040108 | 916 | DD KARFIQRQLVETRQITKHVARILDERFNNELDSKGRRIR--KVKIVTLKSNLVSNFRKEF GFYKIREVNDY | 986 |
| WP_001040109 | 916 | DD KARFIQRQLVETRQITKHVARILDERFNNELDSKGRRIR--KVKIVTLKSNLVSNFRKEF GFYKIREVNDY | 986 |
| WP_001040110 | 916 | DD KARFIQRQLVETRQITKHVARILDERFNNELDSKGRRIR--KVKIVTLKSNLVSNFRKEF GFYKIREVNDY | 986 |
| WP_015058523 | 916 | DD KAGFIQRQLVETRQITKHVARILDERFNNKVDDNNKPIR--KVKIVTLKSNLVSNFRKEF GFYKIREVNNY | 986 |
| WP_017643650 | 916 | DD KARFIQRQLVETRQITKHVARILDERFNNELDSKGRRIR--KVKIVTLKSNLVSNFRKEF GFYKIREVNNY | 986 |
| WP_017647151 | 916 | DD KARFIQRQLVETRQITKHVARILDERFNNELDSKGRRIR--KVKIVTLKSNLVSNFRKEF GFYKIREVNNY | 986 |
| WP_017648376 | 916 | DD KARFIQRQLVETRQITKHVARILDERFNNELDSKGRRIR--KVKIVTLKSNLVSNFRKEF GFYKIREVNNY | 986 |
| WP_017649527 | 916 | DD KARFIQRQLVETRQITKHVARILDERFNNELDSKGRRIR--KVKIVTLKSNLVSNFRKEF GFYKIREVNNY | 986 |
| WP_017771611 | 916 | DD KARFIQRQLVETRQITKHVARILDERFNNELDSKGRRIR--KVKIVTLKSNLVSNFRKEF GFYKIREVNDY | 986 |
| WP_017771984 | 916 | DD KARFIQRQLVETRQITKHVARILDERFNNELDSKGRRIR--KVKIVTLKSNLVSNFRKEF GFYKIREVNNY | 986 |
| CFQ25032 | 916 | DD KARFIQRQLVETRQITKHVARILDERFNNELDSKGRRIR--KVKIVTLKSNLVSNFRKEF GFYKIREVNNY | 986 |
| CFV16040 | 916 | DD KARFIQRQLVEIRQITKHVARILDERFNNELDSKGRRIR--KVKIVTLKSNLVSNFRKEF GFYKIREVNNY | 986 |
| KLJ37842 | 916 | DD KARFIQRQLVETRQITKHVARILDERFNNELDSKGRRIR--KVKIVTVKSNLVSNFRKEF GFYKIREVNNY | 986 |
| KLJ72361 | 916 | DD KARFIQRQLVETRQITKHVARILDELFNNELDSKGRRIR--KVKIVTLKSNLVSNFRKEF GFYKIREVNNY | 986 |
| KLL20707 | 930 | DD KARFIQRQLVETRQITKHVARILDERFNNELDSKGRRIR--KVKIVTLKSNLVSNFRKEF GFYKIREVNNY | 1000 |
| KLL42645 | 916 | DD KARFIQRQLVETRQITKHVARILDERFNNELDSKGRRIR--KVKIVTLKSNLVSNFRKEF GFYKIREVNDY | 986 |
| WP_047207273 | 916 | DD KARFIQRQLVETRQITKHVARILDERFNNELDSKGRRIR--KVKIVTLKSNLVSNFRKEF GFYKIREVNNY | 986 |
| WP_047209694 | 916 | DD KARFIQRQLVETRQITKHVARILDERFNNELDSKGRRIR--KVKIVTLKSNLVSNFRKEF GFYKIREVNNY | 986 |
| WP_050198062 | 916 | DD KARFIQRQLVETRQITKHVARILDERFNNELDSKGRRIR--KVKIVTLKSNLVSNFRKEF GFYKIREVNNY | 986 |
| WP_050201642 | 916 | DD KARFIQRQLVETRQITKHVASILDERFNNELDSKGRRIR--KVKIVTLKSNLVSNFRKEF GFYKIREVNNY | 986 |
| WP_050204027 | 916 | DD KARFIQRQLVETRQITKHVARILDERFNNELDSKGRRIR--KVKIVTLKSNLVSNFRKEF GFYKIREVNDY | 986 |
| WP_050881965 | 916 | DD KARFIQRQLVETRQITKHVARILDERFNNELDSKGRRIR--KVKIVTLKSNLVSNFRKEF GFYKIREVNNY | 986 |
| WP_050886065 | 916 | DD KARFIQRQLVETRQIIKHVARILDERENNELDSKGRRIR--KVKIVTLKSNLVSNFRKEF GFYKIREVNNY | 986 |
| AHN30376 | 916 | DD KAGFIQRQLVETRQITKHVARILDERFNNKVDDNNKPIR--KVKIVILKSNLVSNERKEF GFYKIREVNNY | 986 |
| EAO78426 | 916 | DD KARFIQRQLVETRQIIKHVARILDERENNELDSKGRRIR--KVKIVTLKSNLVSNFRKEF GFYKIREVNNY | 986 |
| CCW42055 | 916 | DD KARFIQRQLVETRQIIKHVARILDERENNELDSKGRRIR--KVKIVTLKSNLVSNFRKEF GFYKIREVNDY | 986 |
| WP_003041502 | 910 | ND KAGFIKRQLVETRQITKHVAQVLDARFNAKHDENKKVIR--DVKIITLKSNLVSQFRKDF KFYKVREINDY | 980 |
| WP_037593752 | 911 | ED KAGFIKRQLVETRQIIKHVAQILDERENTEEDGAQRRIR--NVKIITLKSNLVSNERKEF ELYKVREINDY | 981 |
| WP_049516684 | 911 | ED KAGFIKRQLVETRQIIKHVAQILDERENTEEDGAQRRIR--NVKIITLKSNLVSNERKEF ELYKVREINDY | 981 |
| GAD46167 | 910 | ED KAGFIKRQLVETRQIIKHVAQILDERENTEEDGAQRRIR--NVKIITLKSNLVSNERKEF ELYKVREINDY | 980 |
| WP_018363470 | 919 | AD KAGFIKRQLVETRQIIKHVAQILDARENTERDENDKVIR--DVKVITLKSNLVSQFRKEF KFYKVREINDY | 989 |
| WP_003043819 | 920 | AD KAGFIKRQLVETRQITKHVARILDSRMNTKRDKNDKPIR--EVKVITLKSKLVSDFRKDF QLYKVRDINNY | 990 |
| WP_006269658 | 910 | ED KAGFIKRQLVETRQIIKHVAQILDERENTEEDGNKRRIR--NVKIITLKSNLVSNERKEF ELYKVREINDY | 980 |
| WP_048800889 | 910 | ND KAGFIHRQLVETRQITKHVAQILDARFNPKRDDNKKVIR--DVKIITLKSNLVSQFRRDF KLYKVREINDY | 980 |
| WP_012767106 | 910 | LD KAGFIKRQLVETRQIIKHVAQILDSRMNIKYDENDKLIR--EVKVITLKSKLVSDFRKDF QFYKVREINNY | 980 |
| WP_014612333 | 910 | LD KAGFIKRQLVETRQIIKHVAQILDSRMNIKYDENDKLIR--EVKVITLKSKLVSDFRKDF QFYKVREINNY | 980 |
| WP_015017095 | 910 | LD KAGFIKRQLVETRQIIKHVAQILDSRMNIKYDENDKLIR--EVKVITLKSKLVSDFRKDF QFYKVREINNY | 980 |
| WP_015057649 | 910 | LD KAGFIKRQLVETRQIIKHVAQILDSRMNIKYDENDKLIR--EVKVITLKSKLVSDFRKDF QFYKVREINNY | 980 |
| WP_048327215 | 910 | LD KAGFIKRQLVETRQIIKHVAQILDSRMNIKYDENDKLIR--EVKVITLKSKLVSDFRKDF QFYKVREINNY | 980 |
| WP_049519324 | 910 | LD KAGFIKRQLVETRQIIKHVAQILDSRMNIKYDENDKLIR--EVKVITLKSKLVSDFRKDF QFYKVREINNY | 980 |
| WP_012515931 | 910 | VD KAGFIQRQLVETRQIIKHVAQILDSRENTEFDDHNKRIR--KVHIITLKSKLVSDERKEF GLYKIRDINHY | 980 |
| WP_021320964 | 910 | VD KAGFIQRQLVETRQIIKHVAQILDSRENTEFDDHNKRIR--KVHIITLKSKLVSDERKEF GLYKIRDINHY | 980 |
| WP_037581760 | 910 | VD KAGFIQLQLVETRQIIKHVAQILDSRENTEFDDHNKRIR--KVHIITLKSKLVSDERKEF GLYKIRDINHY | 980 |
| WP_004232481 | 918 | TD KAGFIKRQLVETRQIIKHVAQILDARENTKCDENDKVIR--DVKVITLKSSLVSQFRKEF KFYKVREINDY | 988 |
| WP_009854540 | 919 | AD KAGFIKRQLVETRQIIKHVAQILDARENTEHDENDKVIR--DVKVITLKSNLVSQFRKDF EFYKVREINDY | 989 |
| WP_012962174 | 919 | ND KAGFIKRQLVETRQIIKHVAQILDSRENTERDENDKVIR--NVKVITLKSNLVSQFRKDF KFYKVREINDY | 989 |
| WP_039695303 | 921 | AD KAGFIKRQLVETRQIIKHVAQILDARENTEHDENDKVIR--DVKVITLKSNLVSQFRKDF EFYKVREINDY | 991 |
| WP_014334983 | 918 | AD KAGFIKRQLVETRQIIKHVAQILDARENTKRDENDKVIR--DVKVITLKSNLVSQFRKEF KFYKVREINDY | 988 |
| WP_003099269 | 911 | FD KAGFIKRQLVETRQIIKHVAQILDSRENSNLTEDSKSNR--NVKIITLKSKMVSDERKDF GFYKLREVNDY | 981 |
| AHY15608 | 911 | FD KAGFIKRQLVETRQIIKHVAQILDSRENSNLTEDSKSNR--NVKIITLKSKMVSDERKDF GFYKLREVNDY | 981 |
| AHY17476 | 911 | FD KAGFIKRQLVETRQIIKHVAQILDSRENSNLTEDSKSNR--NVKIITLKSKMVSDERKDF GFYKLREVNDY | 981 |
| ESR09100 | | -- ------------------------------------------------------------ ----------- | |
| AGM98575 | 911 | FD KAGFIKRQLVETRQIIKHVAQILDSRENSNLTEDSKSNR--NVKIITLKSKMVSDERKDF GFYKLREVNDY | 981 |
| ALF27331 | 911 | DD KAGFIKRQLVETRQIIKHVARILDERENTETDENNKKIR--QVKIVTLKSNLVSNERKEF ELYKVREINDY | 981 |
| WP_018372492 | 924 | ED KAGFIRRQLVETRQITKHVARLLDEKLNRKKNENGEKLR--TTKIITLKSVFASRFRANF DLYKLRELNHY | 994 |
| WP_045618028 | 914 | RD KVGFIKRQLVETRQIIKHVAQILDARENTEVTEKDKKDR--SVKIITLKSNLVSNERKEF RLYKVREINDY | 984 |
| WP_045635197 | 913 | RD KVGFIKRQLVETRQIIKHVAQILDARYNTEVNEKDKKNR--TVKIITLKSNLVSNERKEF RLYKVREINDY | 983 |
| WP_002263549 | 911 | DD KAGFIKRQLVETRQIIKHVARILDERENTETDENNKKIR--QVKIVTLKSNLVSNERKEF ELYKVREINDY | 981 |
| WP_002263887 | 911 | DD KAGFIKRQLVETRQIIKHVARILDERENTETDENNKKIR--QVKIVTLKSNLVSNERKEF ELYKVREINDY | 981 |
| WP_002264920 | 911 | DD KAGFIKRQLVETRQIIKHVARILDERENTETDENNKKIR--QVKIVTLKSNLVSNERKEF ELYKVREINDY | 981 |
| WP_002269043 | 911 | DD KAGFIKRQLVETRQIIKHVARILDERENTETDENNKKIR--QVKIVTLKSNLVSNERKEF ELYKVREINDY | 981 |
| WP_002269448 | 911 | DD KAGFIKRQLVETRQITKHVARILDERFYTETDENNKKIR--QVKIVTLKSNLVSNERKEF ELYKVREINDY | 981 |
| WP_002271977 | 911 | DD KAGFIKRQLVETRQITKHVARILDERFYTETDENNKKIR--QVKIVTLKSNLVSNERKEF ELYKVREINDY | 981 |
| WP_002272766 | 911 | DD KAGFIKRQLVETRQITKHVARILDERENTETDENNKKIR--QVKIVTLKSNLVSNERKEF ELYKVREINDY | 981 |
| WP_002273241 | 911 | DD KAGFIKRQLVETRQITKHVARILDERFYTETDENNKKIR--QVKIVTLKSNLVSNERKEF ELYKVREINDY | 981 |
| WP_002275430 | 911 | DD KAGFIKRQLVETRQITKHVARILDERENTETDENNKKIR--QVKIVTLKSNLVSNERKEF ELYKVREINDY | 981 |
| WP_002276448 | 911 | DD KAGFIKRQLVETRQITKHVARILDERFYTETDENNKKIR--QVKIVTLKSNLVSNERKEF ELYKVREINDY | 981 |
| WP_002277050 | 913 | DD KAGFIKRQLVETRQITKHVARMLDERFNKEFDDNNKRIR--RVKIVTLKSNLVSSFRKEF ELYKVREINDY | 983 |
| WP_002277364 | 911 | DD KAGFIKRQLVETRQITKHVARILDERFHTETDENNKKIR--QVKIVTLKSNLVSNFRKEF ELYKVREINDY | 981 |
| WP_002279025 | 911 | DD KAGFIKRQLVETRQITKHVARILDERENTETDENNKKIR--QVKIVTLKSNLVSNERKEF ELYKVREINDY | 981 |
| WP_002279859 | 911 | DD KAGFIKRQLVETRQITKHVARILDERENTETDENNKKIR--QVKIVTLKSNLVSNERKEF ELYKVREINDY | 981 |
| WP_002280230 | 911 | DD KAGFIKRQLVETRQITKHVARILDERFYTETDENNKKIR--QVKIVTLKSNLVSNERKEF ELYKVREINDY | 981 |
| WP_002281696 | 911 | DD KAGFIKRQLVETRQITKHVARILDERFHTETDENNKKIR--QVKIVTLKSNLVSNFRKEF ELYKVREINDY | 981 |
| WP_002282247 | 913 | DD KAGFIKRQLVETRQITKHVARMLDERFNKEFDDNNKRIR--RVKIVTLKSNLVSSFRKEF ELYKVREINDY | 983 |
| WP_002282906 | 911 | DD KAGFIKRQLVETRQITKHVARILDERENTETDENNKKIR--QVKIVTLKSNLVSNERKEF ELYKVREINDY | 981 |
| WP_002283846 | 911 | DD KAGFIKRQLVETRQITKHVARILDERFHTETDENNKKIR--QVKIVTLKSNLVSNFRKEF ELYKVREINDY | 981 |
| WP_002287255 | 911 | DD KAGFIKRQLVETRQITKHVARILDERFHTETDENNKKIR--QVKIVTLKSNLVSNFRKEF ELYKVREINDY | 981 |
| WP_002288990 | 911 | DD KAGFIKRQLVETRQITKHVARILDERENTETDENNKKIR--QVKIVTLKSNLVSNERKEF ELYKVREINDY | 981 |
| WP_002289641 | 911 | DD KAGFIKRQLVETRQITKHVARILDERENTETDENNKKIR--QVKIVTLKSNLVSNERKEF ELYKVREINDY | 981 |
| WP_002290427 | 911 | DD KAGFIKRQLVETRQITKHVARILDERENTETDENNKKIR--QVKIVTLKSNLVSNERKEF ELYKVREINDY | 981 |
| WP_002295753 | 911 | DD KAGFIKRQLVETRQITKHVARILDERFYTETDENNKKIR--QVKIVTLKSNLVSNERKEF ELYKVREINDY | 981 |
| WP_002296423 | 911 | DD KAGFIKRQLVETRQITKHVARILDERFHTETDENNKKIR--QVKIVTLKSNLVSNFRKEF ELYKVREINDY | 981 |
| WP_002304487 | 925 | DD KAGFIKRQLVETRQITKHVARILDERENTETDENNKKIR--QVKIVTLKSNLVSNERKEF ELYKVREINDY | 995 |
| WP_002305844 | 911 | DD KAGFIKRQLVETRQITKHVARILDERFYTETDENNKKIR--QVKIVTLKSNLVSNERKEF ELYKVREINDY | 981 |
| WP_002307203 | 911 | DD KAGFIKRQLVETRQITKHVARILDERENTETDENNKKIR--QVKIVTLKSNLVSNERKEF ELYKVREINDY | 981 |
| WP_002310390 | 911 | DD KAGFIKHQLVETRQITKHVARILDERENTETDENNKKIR--QVKIVTLKSNLVSNERKEF ELYKVREINDY | 981 |
| WP_002352408 | 911 | DD KAGFIKRQLVETRQITKHVARILDERENTETDENNKKIR--QVKIVTLKSNLVSNERKEF ELYKVREINDY | 981 |
| WP_012997688 | 911 | DD KAGFIKRQLVETRQITKHVARILDERFHTETDENNKKIR--QVKIVTLKSNLVSNFRKEF ELYKVREINDY | 981 |
| WP_014677909 | 911 | DD KAGFIKRQLVETRQITKHVARILDERFYTETDENNKKIR--QVKIVTLKSNLVSNERKEF ELYKVREINDY | 981 |
| WP_019312892 | 911 | DD KAGFIKRQLVETRQITKHVARILDERFHTETDENNKKIR--QVKIVTLKSNLVSNFRKEF ELYKVREINDY | 981 |
| WP_019313659 | 911 | DD KAGFIKRQLVETRQITKHVARILDERFHTETDENNKKIR--QVKIVTLKSNLVSNFRKEF ELYKVREINDY | 981 |
| WP_019314093 | 911 | DD KAGFIKRQLVETRQITKHVARILDERENTETDENNKKIR--QVKIVTLKSNLVSNERKEF ELYKVREINDY | 981 |
| WP_019315370 | 911 | DD KAGFIKRQLVETRQITKHVARILDERENTETDENNKKIR--QVKIVTLKSNLVSNERKEF ELYKVREINDY | 981 |
| WP_019803776 | 911 | DD KAGFIKRQLVETRQITKHVARILDERENTETDENNKKIR--QVKIVTLKSNLVSNERKEF ELYKVREINDY | 981 |
| WP_019805234 | 911 | DD KAGFIKRQLVETRQITKHVARILDERENTETDENNKKIR--QVKIVTLKSNLVSNERKEF ELYKVREINDY | 981 |
| WP_024783594 | 911 | DD KAGFIKRQLVETRQITKHVARILDERENTETDENNKKIR--QVKIVTLKSNLVSNERKEF ELYKVREINDY | 981 |
| WP_024784288 | 913 | DD KAGFIKRQLVETRQITKHVARMLDERFNKEFDDNNKRIR--RVKIVTLKSNLVSSFRKEF ELYKVREINDY | 983 |
| WP_024784666 | 911 | DD KAGFIKRQLVETRQITKHVARILDERFHTETDENNKKIR--QVKIVTLKSNLVSNFRKEF ELYKVREINDY | 981 |
| WP_024784894 | 911 | DD KAGFIKRQLVETRQITKHVARILDERENTETDENNKKIR--QVKIVTLKSNLVSNERKEF ELYKVREINDY | 981 |
| WP_024786433 | 913 | DD KAGFIKRQLVETRQITKHVARMLDERFNKEFDDNNKRIR--RVKIVTLKSNLVSSFRKEF ELYKVREINDY | 983 |
| WP_049473442 | 911 | DD KAGFIKRQLVETRQITKHVARILDERENTETDENNKKIR--QVKIVILKSNLVSNERKEF ELYKVREINDY | 981 |
| WP_049474547 | 911 | DD KAGFIKRQLVETRQITKHVARILDERENTETDENNKKIR--QVKIVILKSNLVSNERKEF ELYKVREINDY | 981 |
| EMC03581 | 904 | DD KAGFIKRQLVETRQITKHVARILDERFHTETDENNKKIR--QVKIVILKSNLVSNERKEF ELYKVREINDY | 974 |
| WP_000428612 | 916 | RD KVGFIKRQLVETRQITKHVAQILDARYNTEVNEKDKKNR--TVKIITLKSNLVSNFRKEF RLYKIREINDY | 986 |
| WP_000428613 | 914 | RD KVGFIKRQLVETRQITKHVAQILDARFNKEVNEKDKKNR--TVKIITLKSNLVSNFRKEF RLYKVREINDY | 984 |
| WP_049523028 | 909 | RD KVGFIKRQLVETRQITKHVAQILDDRFNAEVNEKNQKLR--SVKIITLKSNLVSNFRKEF GLYKVREINDY | 979 |
| WP_003107102 | 880 | YD KAGFIKRQLVETRQITKHVAQILNNRENNNVDDSSKNKR--PVKIITLKSKMVSDERKEF GFYKIREVNDY | 950 |
| WP_054279288 | 912 | SD KANFIQRQLVETRQITKHVAQILDSRENTERDEKDRPIR--RVKVITLKSKEVSDFRQDF GFYKLREINDY | 982 |
| WP_049531101 | 914 | RD KVGFIKRQLVETRQITKHVAQILDSRFNIKVNEKNQKIR--TVKIITLKSNLVSNFRKEF RLYKVREINDY | 984 |
| WP_049538452 | 914 | RD KVGFIRRQLVETRQITKHVAQILDSRFNIEVTEKDKKNR--NVKIITLKSNLVSNFRKEF GLYKVREINDY | 984 |
| WP_049549711 | 916 | LD KVGFIKRQLVETRQITKHVAQILDARFNKEVTEKDKKNR--NVKIITLKSNLVSNFRKEF RLYKVREINDY | 986 |
| WP_007896501 | 917 | SD KARFLRRQLVETRQITKHVAQLLDSRENSKSNQNKKLAR--NVKIITLKSKIVSDERKDF GLYKLREVNNY | 987 |
| EFR44625 | 869 | SD KARFLRRQLVETRQITKHVAQLLDSRENSKSNQNKKLAR--NVKIITLKSKIVSDERKDF GLYKLREVNNY | 939 |
| WP_002897477 | 913 | RD KVGFIRRQLVETQQITKNVAQILDARFNIEVKEKNQKIR--TVKIITLKSNLVSNFRKEF GLYKVREINNY | 983 |
| WP_002906454 | 913 | RD KVGFIKRQLVETRQITKHVAQLLDTRFNIEVNEENQKIR--TVKIITLKSNLVSNFRKEF GLYKVREINDY | 983 |
| WP_009729476 | 914 | LD KVGFIKRQLVETRQITKHVAQILDARFNKEVTEKDKKNR--TVKIITLKSNLVSNFRKEF ELYKVREINDY | 984 |
| CQR24647 | 913 | ED KAGFIKRQLVETRQITKHVARILDERFNRDFDKNDKRIR--NVKIVILKSNLVSNERKEF GFYKVREINNF | 983 |
| WP_000066813 | 918 | LD KVGFIKRQLVETRQITKHVAQFLDARFNKEVTEKDKKNR--NVKIITLKSNLVSNFRKEF GLYKVREINDY | 988 |
| WP_009754323 | 914 | RD KVGFIKRQLVETRQITKHVARILDARFNIEVSEKNQKIR--SVKIITLKSNLVSNFRKEF KLYKVREINDY | 984 |
| WP_044674937 | 913 | ED KARFIQRQLVETRQITKHVARILDTRENTKLDEAGNRIRdpKVNIITLKSNLVSQFRKDY QLYKVREINNY | 985 |
| WP_044676715 | 915 | ED KARFIQRQLVETRQITKHVARILDTRENTKLDEAGNRIRdpKVNIITLKSNLVSQFRKDY QLYKVREINNY | 987 |
| WP_044680361 | 915 | ED KARFIQRQLVETRQITKHVARILDTRENTKLDEAGNRIRdpKVNIITLKSNLVSQFRKDY QLYKVREINNY | 987 |
| WP_044681799 | 913 | ED KARFIQRQLVETRQITKHVARILDTRENTKLDEAGNRIRdpKVNIITLKSNLVSQFRKDY QLYKVREINNY | 985 |
| WP_049533112 | 910 | ND KAGFIKRQLVETRQITKHVAQVLDARFNAKHDENKKVIR--DVKIITLKSNLVSQFRKDF KFYKVREINDY | 980 |
| WP_029090905 | 891 | RD KEGFIARQLVETRQITKHVTQLLQQEY-----------K-dTTKVFAIKATLVSGLRRKF EFIKNRNVNDY | 951 |
| WP_006506696 | 917 | RD EERFINRQLVETRQITKNVIQIIEDHYST-------------TKVAAIRANLSHEFRVKN HIYKNRDINDY | 976 |
| AIT42264 | 911 | LD KAGFIKRQLVETRQITKHVAQILDSRMNIKYDENDKLIR--EVKVITLKSKLVSDERKDF QFYKVREINNY | 981 |
| WP_034440723 | 915 | RD RQQFINRQLVETRQITKHVANLLSHHLNEK-----KEVG--EINIVLLKSALTSQFRKKF DFYKVREVNDY | 980 |
| AKQ21048 | 911 | LD KAGFIKRQLVETRQITKHVAQILDSRMNIKYDENDKLIR--EVKVITLKSKLVSDERKDF QFYKVREINNY | 981 |
| WP_004636532 | 916 | AD RAHFLNRQLVETRQITKHVANLLDSQYNTAEEQ-----R---INIVLLKSSMTSRFRKEF KLYKVREINDY | 980 |
| WP_002364836 | 922 | ED KAHFIQRQLVETRQITKNVAGILDQRYNANSKE-----K--KVQIITLKASLTSQFRSIF GLYKVREVNDY | 987 |
| WP_016631044 | 873 | ED KAHFIQRQLVETRQITKNVAGILDQRYNAKSKE-----K--KVQIITLKASLTSQFRSIF GLYKVREVNDY | 938 |
| EMS75795 | 655 | ED KARFIQRQLVETRQITKHVAAILDQYFN-QPEE-SK-NK--GIRIITLKSSLVSQFRKTF GINKVREINNH | 722 |
| WP_002373311 | 922 | ED KAHFIQRQLVETRQITKNVAGILDQRYNAKSKE-----K--KVQIITLKASLTSQFRSIF GLYKVREVNDY | 987 |
| WP_002378009 | 922 | ED KAHFIQRQLVETRQITKNVAGILDQRYNAKSKE-----K--KVQIITLKASLTSQFRSIF GLYKVREVNDY | 987 |
| WP_002407324 | 922 | ED KAHFIQRQLVETRQITKNVAGILDQRYNAKSKE-----K--KVQIITLKASLTSQFRSIF GLYKVREVNDY | 987 |
| WP_002413717 | 922 | ED KAHFIQRQLVETRQITKNVAGILNQRYNANSKE-----K--KVQIITLKASLTSQFRSIF GLYKVREVNDY | 987 |
| WP_010775580 | 924 | ED KAHFIQRQLVETRQITKNVAGILDQRYNAKSKE-----K--KVQIITLKASLTSQFRSIF GLYKVREVNDY | 989 |
| WP_010818269 | 922 | ED KAHFIQRQLVETRQITKNVAGILDQRYNAKSKE-----K--KVQIITLKASLTSQFRSIF GLYKVREVNDY | 987 |
| WP_010824395 | 922 | ED KAHFIQRQLVETRQITKNVAGILDQLYNAKSKE-----K--KVQIITLKASLTSQFRSIF GLYKVREVNDY | 987 |
| WP_016622645 | 922 | ED KAHFIQRQLVETRQITKNVAGILDQRYNAKSKE-----K--KVQIITLKASLTSQFRSIF GLYKVREVNDY | 987 |
| WP_033624816 | 922 | ED KAHFIQRQLVETRQITKNVAGILDQRYNAKSKE-----K--KVQIITLKASLTSQFRSIF GLYKVREVNDY | 987 |
| WP_033625576 | 922 | ED KAHFIQRQLVETRQITKNVAGILDQRYNAKSKE-----K--KVQIITLKASLTSQFRSIF GLYKVREVNDY | 987 |
| WP_033789179 | 922 | ED KAHFIQRQLVETRQITKNVAGILDQRYNAKSKE-----K--KVQIITLKASLTSQFRSIF GLYKVREVNDY | 987 |
| WP_002310644 | 919 | ED KAGFIKRQLVETRQITKHVAGILHHRFN-KAEDTNEPIR--KVRIITLKSALVSQFRNRF GIYKVREINEY | 988 |
| WP_002312694 | 920 | ED KAGFIKRQLVETRQITKHVAGILHHRFN-KAEDTNDPIR--KVRIITLKSALVSQFRNRF GIYKVREINEY | 989 |
| WP_002314015 | 920 | ED KAGFIKRQLVETRQITKHVAGILHHRFN-KAEDTNEPIR--KVRIITLKSALVSQFRNRF GIYKVREINEY | 989 |
| WP_002320716 | 920 | ED KAGFIKRQLVETRQITKHVAGILHHRFN-KAEDTNEPIR--KVRIITLKSALVSQFRNRF GIYKVREINEY | 989 |
| WP_002330729 | 919 | ED KAGFIKRQLVETRQITKHVAGILHHRFN-KAEDTNEPIR--KVRIITLKSALVSQFRNRF GIYKVREINEY | 988 |
| WP_002335161 | 920 | ED KAGFIKRQLVETRQITKHVAGILHHRFN-KAEDTNEPIR--KVRIITLKSALVSQFRNRF GIYKVREINEY | 989 |
| WP_002345439 | 920 | ED KAGFIKRQLVETRQITKHVAGILHHRFN-KAEDTNEPIR--KVRIITLKSALVSQFRNRF GIYKVREINEY | 989 |
| WP_034867970 | 911 | ED KARFIQRQLVETRQITKHVANILHQSFN-QEEEGTD-CD--GVQIITLKATLISQFRQTF GLYKVREINPH | 979 |
| WP_047937432 | 920 | ED KAGFIKRQLVETRQITKHVAGILHHRFN-KAEDINEPIR--KVRIITLKSALVSQFRNRF GIYKVREINEY | 989 |
| WP_010720994 | 911 | ED KARFIQRQLVETRQITKHVANILHQSFN-QEEEGTD-CD--GVQIITLKATLISQFRQTF GLYKVREINPH | 979 |
| WP_010737004 | 911 | ED KARFIQRQLVETRQITKHVANILHQSFN-QEEEGTD-CD--GVQIITLKATLISQFRQTF GLYKVREINPH | 979 |
| WP_034700478 | 911 | ED KARFIQRQLVETRQITKHVANILHQSFN-QEEEGTD-CD--GVQIITLKATLISQFRQTF GLYKVREINPH | 979 |
| WP_007209003 | 912 | SD KAGELKRQLVETRQITKHVATILDSKFNE--DSNNRDVQ-----IITLKSALVSEFRKTF NLYKVREINDL | 977 |
| WP_023519017 | 905 | AD KARFIQRQLVETRQITKHVANLLHQHFN-LPEEVSA-TE--KTSIITLKSTLTSQFRQMF DIYKVREINHH | 973 |
| WP_010770040 | 915 | DD RAHFIKRQLVETRQITKHVARILDQRFNSQKDEEGKTIR--AVRVVTLKSSLTSQFRKQF AIHKVREINDY | 985 |
| WP_048604708 | 912 | DD KAGFIHRQLVETRQITKNVARILHQRFNSEKDEEGNLIR--KVRIITLKSALTSQFRKNY GIYKIREINDY | 982 |
| WP_010750235 | 914 | DD KARFIQRQLVETRQITKHVAAILHQYFN-QTQELEK-EK--DIRIITLKSSLVSQFRQVF GIHKVREINHH | 982 |
| AII16583 | 950 | LD KAGFIKRQLVETRQITKHVAQILDSRMNIKYDENDKLIR--EVKVITLKSKLVSDERKDF QFYKVREINNY | 1020 |
| WP_029073316 | 928 | KD KERFINRQIVETRQITKHVAQIISNHYET-------------TKVVTVRADLSHAFRERY HIYKNRDINDF | 987 |
| WP_031589969 | 928 | KD QERFINRQIVETRQITKHVAQIIDNHYEN-------------TKVVTVRADLSHQFRERY HIYKNRDINDF | 987 |
| KDA45870 | 903 | KL KERFIERQLVETRQITKYVAQLLDQRLN--YDGNGVELD-eKIAIVTLKAQLASQFRSEF KLRKVRALNNL | 972 |
| WP_039099354 | 924 | -D MKGFINRQLVETRQVIKLATNLLMEQYGED-----------NIELITVKSGLTHQMRTEF DFPKNRNLNNH | 990 |
| AKP02966 | 926 | KD KLGFIHRQLVQTSQMVKGVANILNSMYK---NQGTTCIQ--------ARANLSTAFRKAL ELVKNRNINDF | 999 |
| WP_010991369 | 914 | AD KARFIHRQLVETRQITKNVANILHQRFNYEKDDHGNTMK--QVRIVTLKSALVSQFRKQF QLYKVRDVNDY | 984 |
| WP_033838504 | 914 | AD KARFIHRQLVETRQITKNVANILHQRFNYEKDDHGNTMK--QVRIVTLKSALVSQFRKQF QLYKVRDVNDY | 984 |
| EHN60060 | 917 | AD KARFIHRQLVETRQITKNVANILHQRFNYEKDDHGNTMK--QVRIVTLKSALVSQFRKQF QLYKVRDVNDY | 987 |
| EFR89594 | 683 | AD KARFIHRQLVETRQITKNVANILHQRFNYGKDDHGNTMK--QVRIVTLKSALVSQFRKQF QLYKVRGVNDY | 753 |
| WP_038409211 | 914 | AD KANFIQRQLVETRQITKNVANILYQRFNCKQDENGNEVE--QVRIVTLKSTLVSQFRKQF QLYKVREVNDY | 984 |
| EFR95520 | 533 | AD KANFIQRQLVETRQITKNVANILYQRFNCKQDENGNEVE--QVRIVTLKSTLVSQFRKQF QLYKVREVNDY | 603 |
| WP_003723650 | 914 | AD KARFIHRQLVETRQITKNVANILYQRFNKEIDNHGNIME--QVRIVTLKSALVSQFRKQF QLYKVREVNGY | 984 |
| WP_003727705 | 914 | AD KARFIHRQLVETRQITKNVANILHQRFNKEIDNHGNTME--QVRIVTLKSALVSQFRKQF QLYKVREVNDY | 984 |
| WP_003730785 | 914 | AD KARFIHRQLVETRQITKNVANILHQRFNKEIDNHGNTME--QVRIVTLKSALVSQFRKQF QLYKVREVNDY | 984 |
| WP_003733029 | 914 | AD KARFIHRQLVETRQITKNVANILHQRFNYKIDGNKDTME--TVRIVTLKSALVSQFRKQF QFYKVREVNDY | 984 |
| WP_003739838 | 914 | AD KATFIHRQLVETRQITKNVANILHQRFNNETDNHGNNME--QVRIVMLKSALVSQFRKQF QLYKVREVNDY | 984 |
| WP_014601172 | 914 | AD KARFIHRQLVETRQITKNVANILHQRFNNETDNHGNTME--QVRIVTLKSALVSQFRKQF QLYKVREVNDY | 984 |
| WP_023548323 | 914 | AD KARFIHRQLVETRQITKNVANILHQRFNYKTDDNEDTME--PVRIVTLKSALVSQFRKQF QLYKVREVNDY | 984 |
| WP_031665337 | 914 | AD KARFIHRQLVETRQITKNVANILHQRFNKETDNHGNTME--QVRIVTLKSALVSQFRKQF QLYKVREVNDY | 984 |
| WP_031669209 | 914 | AD KARFIHRQLVETRQITKNVANILHQRFNYKTDGNKDTME--TVRIVTLKSALVSQFRKQF QFYKVREVNDY | 984 |
| WP_033920898 | 914 | AD KARFIHRQLVETRQITKNVANILHQRFNYKTDDNEDTME--PVRIVTLKSALVSQFRKQF QLYKVREVNDY | 984 |
| AKI42028 | 917 | AD KARFIHRQLVETRQITKNVANILHQRFNNETDNHGNTME--QVRIVTLKSALVSQFRKQF QLYKVREVNDY | 987 |
| AKI50529 | 917 | AD KARFIHRQLVETRQITKNVANILHQRFNYKTDDNEDTME--PVRIVTLKSALVSQFRKQF QLYKVREVNDY | 987 |
| EFR83390 | 362 | AD KARFIHRQLVETRQITKNVANILHQRFNNETDNHGNTME--QVRIVTLKSALVSQFRKQF QLYKVREVNDY | 432 |
| WP_046323366 | 914 | AD KARFIHRQLVETRQITKNVANILHQRFNCKKDESGNVIE--QVRIVTLKAALVSQFRKQF QLYKVREVNDY | 984 |
| AKE81011 | 927 | LD KAGFIKRQLVETRQITKHVAQILDSRMNIKYDENDKLIR--EVKVITLKSKLVSDFRKDF QFYKVREINNY | 997 |
| CUO82355 | 921 | RD EERFINRQLVETRQITKNVTQIIEDHYST-------------TKVAAIRANLSHEFRVKN HIYKNRDINDY | 980 |
| WP_033162887 | 923 | KD KERFINRQLVETRQIIKNVAVIINDHYTN-------------TNIVTVRAELSHQFRERY KIYKNRDINDF | 982 |
| AGZ01981 | 944 | LD KAGFIKRQLVETRQIIKHVAQILDSRMNIKYDENDKLIR--EVKVITLKSKLVSDFRKDF QFYKVREINNY | 1014 |
| AKA60242 | 911 | LD KAGFIKRQLVETRQIIKHVAQILDSRMNIKYDENDKLIR--EVKVITLKSKLVSDFRKDF QFYKVREINNY | 981 |
| AKS40380 | 911 | LD KAGFIKRQLVETRQIIKHVAQILDSRMNIKYDENDKLIR--EVKVITLKSKLVSDFRKDF QFYKVREINNY | 981 |
| 4UN5_B | 915 | LD KAGFIKRQLVETRQIIKHVAQILDSRMNIKYDENDKLIR--EVKVITLKSKLVSDFRKDF QFYKVREINNY | 985 |
| WP_010922251 | 982 | [chemical structure] | 1051 |
| WP_039695303 | 992 | HHAHDAYLNAVVGTALLKKYPKL-ASEFVYGEYKKYDI S---SD------ KATAK--YfFYSNLM-NFFKTKVK | 1058 |
| WP_045635197 | 984 | HHAHDAYLNAVVAKAILKKYPKL-EPEFVYGEYQKYDL SkdpKEV---EK ATEKY--F-FYSNLL-NFFKEEVH | 1055 |
| 5AXW_A | 703 | HHAEDALI--------------IaNADFIFKEWKKLDK Nq-mFE----EK ETEQEykEiFITPHQiKHIKDFKD | 771 |
| WP_009880683 | 666 | HHAHDAYLNAVVGTALIKKYPKL-ESEFVYGDYKVYDI S---EQEi--GK ATAKY--F-FYSNIM-NFFKTEIT | 735 |
| WP_010922251 | 982 | HHAHDAYLNAVVGTALIKKYPKL-ESEFVYGDYKVYDV S---EQEi--GK ATAKY--F-FYSNIM-NFFKTEIT | 1051 |
| WP_011054416 | 982 | HHAHDAYLNAVVGTALIKKYPKL-ESEFVYGDYKVYDV S---EQEi--GK ATAKY--F-FYSNIM-NFFKTEIT | 1051 |
| WP_011284745 | 982 | HHAHDAYLNAVVGTALIKKYPKL-ESEFVYGDYKVYDV S---EQEi--GK ATAKY--F-FYSNIM-NFFKTEIT | 1051 |
| WP_011285506 | 982 | HHAHDAYLNAVVGTALIKKYPKL-ESEFVYGDYKVYDV S---EQEi--GK ATAKY--F-FYSNIM-NFFKTEIT | 1051 |
| WP_011527619 | 982 | HHAHDAYLNAVVGTALIKKYPKL-ESEFVYGDYKVYDV S---EQEi--GK ATAKY--F-FYSNIM-NFFKTEIT | 1051 |
| WP_012560673 | 982 | HHAHDAYLNAVVGTALIKKYPKL-ESEFVYGDYKVYDI S---EQEi--GK ATAKY--F-FYSNIM-NFFKTEIT | 1051 |
| WP_014407541 | 981 | HHAHDAYLNAVVGTALIKKYPKL-ESEFVYGDYKVYDV S---EQEi--GK ATAKY--F-FYSNIM-NFFKTEIT | 1050 |
| WP_020905136 | 982 | HHAHDAYLNAVVGTALIKKYPKL-ESEFVYGDYKVYDV S---EQEi--GK ATAKY--F-FYSNIM-NFFKTEIT | 1051 |
| WP_023080005 | 981 | HHAHDAYLNAVVGTALIKKYPKL-ESEFVYGDYKVYDV S---EQEi--GK ATAKY--F-FYSNIM-NFFKTEIT | 1050 |
| WP_023610282 | 981 | HHAHDAYLNAVVGTALIKKYPKL-ESEFVYGDYKVYDV S---EQEi--GK ATAKY--F-FYSNIM-NFFKTEIT | 1050 |
| WP_030125963 | 982 | HHAHDAYLNAVVGTALIKKYPKL-ESEFVYGDYKVYDV S---EQEi--GK ATAKY--F-FYSNIM-NFFKTEIT | 1051 |
| WP_030126706 | 982 | HHAHDAYLNAVVGTALIKKYPKL-ESEFVYGDYKVYDV S---EQEi--GK ATAKY--F-FYSNIM-NFFKTEIT | 1051 |
| WP_031488318 | 982 | HHAHDAYLNAVVGTALIKKYPKL-ESEFVYGDYKVYDV S---EQEi--GK ATAKY--F-FYSNIM-NFFKTEIT | 1051 |
| WP_032460140 | 982 | HHAHDAYLNAVVGTALIKKYPKL-ESEFVYGDYKVYDI S---EQEi--GK ATAKY--F-FYSNIM-NFFKTEIT | 1051 |
| WP_032461047 | 982 | HHAHDAYLNAVVGTALIKKYPKL-ESEFVYGDYKVYDI S---EQEi--GK ATAKY--F-FYSNIM-NFFKTEIT | 1051 |
| WP_032462016 | 982 | HHAHDAYLNAVVGTALIKKYPKL-ESEFVYGDYKVYDV S---EQEi--GK ATAKY--F-FYSNIM-NFFKTEIT | 1051 |
| WP_032462936 | 982 | HHAHDAYLNAVVGTALIKKYPKL-ESEFVYGDYKVYDV S---EQEi--GK ATAKY--F-FYSNIM-NFFKTEIT | 1051 |
| WP_032464890 | 982 | HHAHDAYLNAVVGTALIKKYPKL-ESEFVYGDYKVYDV S---EQEi--GK ATAKY--F-FYSNIM-NFFKTEIT | 1051 |
| WP_033888930 | 807 | HHAHDAYLNAVVGTALIKKYPKL-ESEFVYGDYKVYDV S---EQEi--GK ATAKY--F-FYSNIM-NFFKTEIT | 876 |
| WP_038431314 | 982 | HHAHDAYLNAVVGTALIKKYPKL-ESEFVYGDYKVYDV S---EQEi--GK ATAKY--F-FYSNIM-NFFKTEIT | 1051 |
| WP_038432938 | 981 | HHAHDAYLNAVVGTALIKKYPKL-ESEFVYGDYKVYDV S---EQEi--GK ATAKY--F-FYSNIM-NFFKTEIT | 1050 |
| WP_038434062 | 982 | HHAHDAYLNAVVGTALIKKYPKL-ESEFVYGDYKVYDV S---EQEi--GK ATAKY--F-FYSNIM-NFFKTEIT | 1051 |
| BAQ51233 | 893 | HHAHDAYLNAVVGTALIKKYPKL-ESEFVYGDYKVYDV S---EQEi--GK ATAKY--F-FYSNIM-NFFKTEIT | 962 |
| KGE60162 | 157 | HHAHDAYLNAVVGTALIKKYPKL-ESEFVYGDYKVYDV S---EQEi--GK ATAKY--F-FYSNIM-NFFKTEIT | 226 |
| KGE60856 | | -------------------------------------- ------------ ------------------------ | |
| WP_002989955 | 982 | HHAHDAYLNAVVGTALIKKYPKL-ESEFVYGDYKVYDV S---EQEi--GK ATAKY--F-FYSNIM-NFFKTEIT | 1051 |
| WP_003030002 | 981 | HHAHDAYLNAVVGNALLLKYPQL-EPEFVYGEYPKYN- S---YR---sRK SATEK--FlFYSNIL-RFFKKE-- | 1041 |
| WP_003065552 | 992 | HHAHDAYLNAVVGTALLKKYPKL-ASEFVYGEYKKYDI S---SD------ KATAK--YfFYSNLM-NFFKRVIR | 1058 |
| WP_001040076 | 987 | HHAHDAYLNAVVAKAILTKYPQL-EPEFVYGDYPKYN- S---YKT---RK ATEKL--F-FYSNIM-NFFKTKVT | 1049 |
| WP_001040078 | 987 | HHAHDAYLNAVVAKAILTKYPQL-EPEFVYGLYRRKK- L---SKI---VR ATRKM--F-FYSNLM-NMFKRVVR | 1057 |
| WP_001040080 | 987 | HHAHDAYLNAVVAKAILTKYPQL-EPEFVYGDYPKYN- S---YKT---RK ATEKL--F-FYSNIM-NFFKTKVT | 1049 |
| WP_001040081 | 987 | HHAHDAYLNAVVAKAILTKYPQL-EPEFVYGDYPKYN- S---YKT---RK ATEKL--F-FYSNIM-NFFKTKVT | 1049 |
| WP_001040083 | 987 | HHAHDAYLNAVVAKAILTKYPQL-EPEFVYGDYPKYN- S---YKT---RK ATEKL--F-FYSNIM-NFFKTKVT | 1049 |
| WP_001040085 | 987 | HHAHDAYLNAVVAKAILTKYPQL-EPEFVYGDYPKYN- S---YKT---RK ATEKL--F-FYSNIM-NFFKTKVT | 1049 |
| WP_001040087 | 987 | HHAHDAYLNAVVAKAILTKYPQL-EPEFVYGDYPKYN- S---YKT---RK ATEKL--F-FYSNIM-NFFKTKVT | 1049 |
| WP_001040088 | 987 | HHAHDAYLNAVVAKAILTKYPQL-EPEFVYGDYPKYN- S---YKT---RK ATEKL--F-FYSNIM-NFFKTKVT | 1049 |
| WP_001040089 | 987 | HHAHDAYLNAVVAKAILTKYPQL-EPEFVYGDYPKYN- S---YKT---RK ATEKL--F-FYSNIM-NFFKTKVT | 1049 |
| WP_001040090 | 987 | HHAHDAYLNAVVAKAILTKYPQL-EPEFVYGDYPKYN- S---YKT---RK ATEKL--F-FYSNIM-NFFKTKVT | 1049 |
| WP_001040091 | 987 | HHAHDAYLNAVVAKAILTKYPQL-EPEFVYGDYPKYN- S---YKT---RK ATEKL--F-FYSNIM-NFFKTKVT | 1049 |
| WP_001040092 | 987 | HHAHDAYLNAVVAKAILTKYPQL-EPEFVYGDYPKYN- S---YKT---RK ATEKL--F-FYSNIM-NFFKTKVT | 1049 |
| WP_001040094 | 987 | HHAHDAYLNAVVAKAILTKYPQL-EPEFVYGDYPKYN- S---YKT---RK ATEKL--F-FYSNIM-NFFKTKVT | 1049 |
| WP_001040095 | 987 | HHAHDAYLNAVVAKAILTKYPQL-EPEFVYGDYPKYN- S---YKT---RK ATEKL--F-FYSNIM-NFFKTKVT | 1049 |
| WP_001040096 | 987 | HHAHDAYLNAVVAKAILTKYPQL-EPEFVYGDYPKYN- S---YKT---RK ATEKL--F-FYSNIM-NFFKTKVT | 1049 |
| WP_001040097 | 987 | HHAHDAYLNAVVAKAILTKYPQL-EPEFVYGDYPKYN- S---YKT---RK ATEKL--F-FYSNIM-NFFKTKVT | 1049 |
| WP_001040098 | 987 | HHAHDAYLNAVVAKAILTKYPQL-EPEFVYGDYPKYN- S---YKT---RK ATEKL--F-FYSNIM-NFFKTKVT | 1049 |
| WP_001040099 | 987 | HHAHDAYLNAVVAKAILTKYPQL-EPEFVYGDYPKYN- S---YKT---RK ATEKL--F-FYSNIM-NFFKTKVT | 1049 |
| WP_001040100 | 987 | HHAHDAYLNAVVAKAILTKYPQL-EPEFVYGDYPKYN- S---YKT---RK ATEKL--F-FYSNIM-NFFKTKVT | 1049 |
| WP_001040104 | 987 | HHAHDAYLNAVVAKAILTKYPQL-EPEFVYGDYPKYN- S---YKT---RK ATEKL--F-FYSNIM-NFFKTKVT | 1049 |
| WP_001040105 | 987 | HHAHDAYLNAVVAKAILTKYPQL-EPEFVYGDYPKYN- S---YKT---RK ATEKL--F-FYSNIM-NFFKTKVT | 1049 |
| WP_001040106 | 987 | HHAHDAYLNAVVAKAILTKYPQL-EPEFVYGDYPKYN- S---YKT---RK ATEKL--F-FYSNIM-NFFKTKVT | 1049 |
| WP_001040107 | 987 | HHAHDAYLNAVVAKAILTKYPQL-EPEFVYGDYPKYN- S---YKT---RK ATEKL--F-FYSNIM-NFFKTKVT | 1049 |
| WP_001040108 | 987 | HHAHDAYLNAVVAKAILTKYPQL-EREFVYGDYPKYN- S---YKT---RK ATEKL--F-FYSNIM-NFFKTKVT | 1049 |
| WP_001040109 | 987 | HHAHDAYLNAVVAKAILTKYPQL-EPEFVYGDYPKYN- S---YKT---RK ATEKL--F-FYSNIM-NFFKTKVT | 1049 |
| WP_001040110 | 987 | HHAHDAYLNAVVAKAILTKYPQL-EPEFVYGDYPKYN- S---YKT---RK ATEKL--F-FYSNIM-NFFKTKVT | 1049 |
| WP_015058523 | 987 | HHAHDAYLNAVVAKAILTKYPQL-EPEFVYGDYPKYN- S---YKT---RK ATEKL--F-FYSNIM-NFFKTKVT | 1049 |
| WP_017643650 | 987 | HHAHDAYLNAVVAKAILTKYPQL-EPEFVYGDYPKYN- S---YKT---RK ATEKL--F-FYSNIM-NFFKTKVT | 1049 |
| WP_017647151 | 987 | HHAHDAYLNAVVAKAILTKYPQL-EPEFVYGDYPKYN- S---YKT---RK ATEKL--F-FYSNIM-NFFKTKVT | 1049 |
| WP_017648376 | 987 | HHAHDAYLNAVVAKAILTKYPQL-EPEFVYGDYPKYN- S---YKT---RK ATEKL--F-FYSNIM-NFFKTKVT | 1049 |
| WP_017649527 | 987 | HHAHDAYLNAVVAKAILTKYPQL-EPEFVYGDYPKYN- S---YKT---RK ATEKL--F-FYSNIM-NFFKTKVT | 1049 |
| WP_017771611 | 987 | HHAHDAYLNAVVAKAILTKYPQL-EPEFVYGDYPKYN- S---YKT---RK ATEKL--F-FYSNIM-NFFKTKVT | 1049 |
| WP_017771984 | 987 | HHAHDAYLNAVVAKAILTKYPQL-EPEFVYGDYPKYN- S---YKT---RK ATEKL--F-FYSNIM-NFFKTKVT | 1049 |
| CFQ25032 | 987 | HHAHDAYLNAVVAKAILTKYPQL-EPEFVYGDYPKYN- S---YKT---RK ATEKL--F-FYSNIM-NFFKTKVT | 1049 |
| CFV16040 | 987 | HHAHDAYLNAVVAKAILTKYPQL-EPEFVYGDYPKYN- S---YKT---RK ATEKL--F-FYSNIM-NFFKTKVT | 1049 |
| KLJ37842 | 987 | HHAHDAYLNAVVAKAILTKYPQL-EPEFVYGDYPKYN- S---YKT---RK ATEKL--F-FYSNIM-NFFKTKVT | 1049 |
| KLJ72361 | 987 | HHAHDAYLNAVVAKAILTKYPQL-EPEFVYGDYPKYN- S---YKT---RK ATEKL--F-FYSNIM-NFFKTKVT | 1049 |
| KLL20707 | 1001 | HHAHDAYLNAVVAKAILTKYPQL-EPEFVYGDYPKYN- S---YKT---RK ATEKL--F-FYSNIM-NFFKTKVT | 1063 |
| KLL42645 | 987 | HHAHDAYLNAVVAKAILTKYPQL-EPEFVYGDYPKYN- S---YKT---RK ATEKL--F-FYSNIM-NFFKTKVT | 1049 |
| WP_047207273 | 987 | HHAHDAYLNAVVAKAILTKYPQL-EPEFVYGDYPKYN- S---YKT---RK ATEKL--F-FYSNIM-NFFKTKVT | 1049 |
| WP_047209694 | 987 | HHAHDAYLNAVVAKAILTKYPQL-EPEFVYGDYPKYN- S---YKT---RK ATEKL--F-FYSNIM-NFFKTKVT | 1049 |
| WP_050198062 | 987 | HHAHDAYLNAVVAKAILTKYPQL-EPEFVYGDYPKYN- S---YKT---RK ATEKL--F-FYSNIM-NFFKTKVT | 1049 |
| WP_050201642 | 987 | HHAHDAYLNAVVAKAILTKYPQL-EPEFVYGDYPKYN- S---YKT---RK ATEKL--F-FYSNIM-NFFKTKVT | 1049 |
| WP_050204027 | 987 | HHAHDAYLNAVVAKAILTKYPQL-EPEFVYGDYPKYN- S---YKT---RK ATEKL--F-FYSNIM-NFFKTKVT | 1049 |
| WP_050881965 | 987 | HHAHDAYLNAVVAKAILTKYPQL-EPEFVYGDYPKYN- S---YKT---RK ATEKL--F-FYSNIM-NFFKTKVT | 1049 |
| WP_050886065 | 987 | HHAHDAYLNAVVAKAILTKYPQL-EPEFVYGDYPKYN- S---YKT---RK ATEKL--F-FYSNIM-NFFKTKVT | 1049 |
| AHN30376 | 987 | HHAHDAYLNAVVAKAILTKYPQL-EPEFVYGDYPKYN- S---YKT---RK ATEKL--F-FYSNIM-NFFKTKVT | 1049 |
| EAO78426 | 987 | HHAHDAYLNAVVAKAILTKYPQL-EPEFVYGDYPKYN- S---YKT---RK ATEKL--F-FYSNIM-NFFKTKVT | 1049 |
| CCW42055 | 987 | HHAHDAYLNAVVAKAILTKYPQL-EPEFVYGDYPKYN- S---YKT---RK ATEKL--F-FYSNIM-NFFKTKVT | 1049 |
| WP_003041502 | 981 | HHAHDAYLNAVIGTALLKKYPKL-ASEFVYGEFKKYDV S---DK---eIG KATAK--YfFYSNLM-NFFKKEVK | 1050 |
| WP_037593752 | 982 | HHAHDAYLNAVVGNALLLKYPQL-EPEFVYGEYPKYN- S---YR---sRK SATEK--FlFYSNIL-RFFKKE-- | 1042 |
| WP_049516684 | 982 | HHAHDAYLNAVVGNALLLKYPQL-EPEFVYGEYPKYN- S---YR---sRK SATEK--FlFYSNIL-RFFKKE-- | 1042 |
| GAD46167 | 981 | HHAHDAYLNAVVGNALLLKYPQL-EPEFVYGEYPKYN- S---YR---sRK SATEK--FlFYSNIL-RFFKKE-- | 1041 |
| WP_018363470 | 990 | HHAHDAYLNAVVGTALLKKYPKL-APEFVYGEYKKYDV S---SDDhseMG KATAK--YfFYSNLM-NFFKRVIR | 1062 |
| WP_003043819 | 991 | HHAHDAYLNAVVGTALIKKYPKL-ESEFVYGDYKVYDV S---EQEi--GK ATAKR--F-FYSNIM-NFFKTEVK | 1060 |
| WP_006269658 | 981 | HHAHDAYLNAVVGNALLLKYPQL-EPEFVYGEYPKYN- S---YR---sRK SATEK--FlFYSNIL-RFFKKE-- | 1041 |
| WP_048800889 | 981 | HHAHDAYLNAVVGTALLKKYPKL-TSEFVYGEYKKYDV S---DND--eIG KATAK--YfFYSNLM-NFFKTEVK | 1051 |
| WP_012767106 | 981 | HHAHDAYLNAVVGTALIKKYTKL-ESEFVYGDYKVYDV S---EQEi--GK ATAKR--F-FYSNIM-NFFKTEIT | 1050 |
| WP_014612333 | 981 | HHAHDAYLNAVVGTALIKKYPKL-ESEFVYGDYKVYDV S---EQEi--GK ATAKR--F-FYSNIM-NFFKTEIT | 1050 |
| WP_015017095 | 981 | HHAHDAYLNAVVGTALIKKYPKL-ESEFVYGDYKVYDV S---EQEi--GK ATAKR--F-FYSNIM-NFFKTEIT | 1050 |
| WP_015057649 | 981 | HHAHDAYLNAVVGTALIKKYPKL-ESEFVYGDYKVYDV S---EQEi--GK ATAKR--F-FYSNIM-NFFKTEIT | 1050 |
| WP_048327215 | 981 | HHAHDAYLNAVVGTALIKKYPKL-ESEFVYGDYKVYDV S---EQEi--GK ATAKR--F-FYSNIM-NFFKTEIT | 1050 |
| WP_049519324 | 981 | HHAHDAYLNAVVGTALIKKYPKL-ESEFVYGDYKVYDV S---EQEi--GK ATAKR--F-FYSNIM-NFFKTEIT | 1050 |
| WP_012515931 | 981 | HHAHDAYLNAVVAKAILGKYPQL-APEFVYGDYPKYN- S---FKEr--QK ATQKM--L-FYSNIL-KFFKDQES | 1043 |
| WP_021320964 | 981 | HHAHDAYLNAVVAKAILGKYPQL-APEFVYGDYPKYN- S---FKEr--QK ATQKT--L-FYSNIL-KFFKDQES | 1043 |
| WP_037581760 | 981 | HHAHDAYLNAVVAKAILGKYPQL-APEFVYGDYPKYN- S---FKEr--QK ATQKT--L-FYSNIL-KFFKDQES | 1043 |
| WP_004232481 | 989 | HHAHDAYLNAVVGTALLKKYPKL-APEFVYGEYKKYDV S---SDNhseLG KATAK--YfFYSNLM-NFFKTEVK | 1061 |
| WP_009854540 | 990 | HHAHDAYLNAVVGTALLKKYPKL-ASEFVYGEYKKYDI S---SD------ KATAK--YfFYSNLM-NFFKTKVK | 1056 |
| WP_012962174 | 990 | HHAHDAYLNAVVGTALLKKYPKL-APEFVYGEYKKYDI S---GD------ KATAK--YfFYSNLM-NFFKRVIR | 1056 |
| WP_039695303 | 992 | HHAHDAYLNAVVGTALLKKYPKL-ASEFVYGEYKKYDI S---SD------ KATAK--YfFYSNLM-NFFKTKVK | 1058 |
| WP_014334983 | 989 | HHAHDAYLNAVVGTALLKKYPKL-TPEFVYGEYKKYDV S---SDDyseMG KATAK--YfFYSNLM-NFFKTEVK | 1061 |
| WP_003099269 | 982 | HHAQDAYLNAVVGTALLKKYPKL-EAEFVYGDYKHYDL P---DSSl--GK ATTRM--F-FYSNLM-NFFKKEIK | 1051 |
| AHY15608 | 982 | HHAQDAYLNAVVGTALLKKYPKL-EAEFVYGDYKHYDL P---DSSl--GK ATTRM--F-FYSNLM-NFFKKEIK | 1051 |
| AHY17476 | 982 | HHAQDAYLNAVVGTALLKKYPKL-EAEFVYGDYKHYDL P---DSSl--GK ATTRM--F-FYSNLM-NFFKKEIK | 1051 |
| ESR09100 | | -------------------------------------- ------------ ------------------------ | |
| AGM98575 | 982 | HHAQDAYLNAVVGTALLKKYPKL-EAEFVYGDYKHYDL P---DSSl--GK ATTRM--F-FYSNLM-NFFKKEIK | 1051 |
| ALF27331 | 982 | HHAHDAYLNAVIGKALLGVYPQL-EPEFVYGDYPHFH- G---HK---eNK ATAKK--F-FYSNIM-NFFKKD-- | 1041 |
| WP_018372492 | 995 | HHAHDAYLNAVVAQALLKVYPKF-ERELVYGSYVKESI ----FS----RK ATERM---rMYNNIL-KFISKD-- | 1055 |
| WP_045618028 | 985 | HHAHDPYLNAVVAKAILKKYPKL-EPEFVYGDYQKYDL TkdpKEV---EK ATEKY--F-FYSNLL-NFFKEEVH | 1056 |
| WP_045635197 | 984 | HHAHDAYLNAVVAKAILKKYPKL-EPEFVYGEYQKYDL SkdpKEV---EK ATEKY--F-FYSNLL-NFFKEEVH | 1055 |
| WP_002263549 | 982 | HHAHDAYLNAVIGKALLGVYPQL-EPEFVYGDYPHFH- G---HK---eNK ATAKK--F-FYSNIM-NFFKKD-- | 1041 |
| WP_002263887 | 982 | HHAHDAYLNAVIGKALLGVYPQL-EPEFVYGDYPHFH- G---HK---eNK ATAKK--F-FYSNIM-NFFKKD-- | 1041 |
| WP_002264920 | 982 | HHAHDAYLNAVIGKALLGVYPQL-EPEFVYGDYPHFH- G---HK---eNK ATAKK--F-FYSNIM-NFFKKD-- | 1041 |
| WP_002269043 | 982 | HHAHDAYLNAVIGKALLGVYPQL-EPEFVYGDYPHFH- G---HK---eNK ATAKK--F-FYSNIM-NFFKKD-- | 1041 |
| WP_002269448 | 982 | HHAHDAYLNAVIGKALLGVYPQL-EPEFVYGDYPHFH- G---HK---eNK ATAKK--F-FYSNIM-NFFKKD-- | 1041 |
| WP_002271977 | 982 | HHAHDAYLNAVIGKALLGVYPQL-EPEFVYGDYPHFH- G---HK---eNK ATAKK--F-FYSNIM-NFFKKD-- | 1041 |
| WP_002272766 | 982 | HHAHDAYLNAVIGKALLGVYPQL-EPEFVYGDYPHFH- G---HE---eNK ATAKK--F-FYSNIM-NFFKKD-- | 1041 |
| WP_002273241 | 982 | HHAHDAYLNAVIGKALLGVYPQL-EPEFVYGDYPHFH- G---HK---eNK ATAKK--F-FYSNIM-NFFKKD-- | 1041 |
| WP_002275430 | 982 | HHAHDAYLNAVIGKALLGVYPQL-EPEFVYGDYPHFH- G---HE---eNK ATAKK--F-FYSNIM-NFFKKD-- | 1041 |
| WP_002276448 | 982 | HHAHDAYLNAVIGKALLGVYPQL-EPEFVYGDYPHFH- G---HK---eNK ATAKK--F-FYSNIM-NFFKKD-- | 1041 |
| WP_002277050 | 984 | HHAHDAYLNAVVVKALLVKYPKL-EPEFVYGEYPKYN- S---YR---eRK ATQKM--F-FYSNIM-NMFKSKVK | 1046 |
| WP_002277364 | 982 | HHAHDAYLNAVIGKALLGVYPQL-EPEFVYGDYPHFH- G---HK---eNK ATAKK--F-FYSNIM-NFFKKD-- | 1041 |
| WP_002279025 | 982 | HHAHDAYLNAVIGKALLGVYPQL-EPEFVYGDYPHFH- G---HE---eNK ATAKK--F-FYSNIM-NFFKKD-- | 1041 |
| WP_002279859 | 982 | HHAHDAYLNAVIGKALLGVYPQL-EPEFVYGDYPHFH- G---HK---eNK ATAKK--F-FYSNIM-NFFKKD-- | 1041 |
| WP_002280230 | 982 | HHAHDAYLNAVIGKALLGVYPQL-EPEFVYGDYPHFH- G---HK---eNK ATAKK--F-FYSNIM-NFFKKD-- | 1041 |
| WP_002281696 | 982 | HHAHDAYLNAVIGKALLGVYPQL-EPEFVYGDYPHFH- G---HK---eNK ATAKK--F-FYSNIM-NFFKKD-- | 1041 |
| WP_002282247 | 984 | HHAHDAYLNAVVVKALLVKYPKL-EPEFVYGEYPKYN- S---YR---eRK ATQKM--F-FYSNIM-NMFKSKVK | 1046 |
| WP_002282906 | 982 | HHAHDAYLNAVIGKALLGVYPQL-EPEFVYGDYPHFH- G---HK---eNK ATAKK--F-FYSNIM-NFFKKD-- | 1041 |
| WP_002283846 | 982 | HHAHDAYLNAVIGKALLGVYPQL-EPEFVYGDYPHFH- G---HK---eNK ATAKK--F-FYSNIM-NFFKKD-- | 1041 |
| WP_002287255 | 982 | HHTHDAYLNAVIGKALLGVYPQL-EPEFVYGDYPHFH- G---HK---eNK ATAKK--F-FYSNIM-NFFKKD-- | 1041 |
| WP_002288990 | 982 | HHAHDAYLNAVIGKALLGVYPQL-EPEFVYGDYPHFH- G---HK---eNK ATAKK--F-FYSNIM-NFFKKD-- | 1041 |
| WP_002289641 | 982 | HHAHDAYLNAVIGKALLGVYPQL-EPEFVYGDYPHFH- G---HK---eNK ATAKK--F-FYSNIM-NFFKKD-- | 1041 |
| WP_002290427 | 982 | HHAHDAYLNAVIGKALLGVYPQL-EPEFVYGDYPHFH- G---HK---eNK ATAKK--F-FYSNIM-NFFKKD-- | 1041 |
| WP_002295753 | 982 | HHAHDAYLNAVIGKALLGVYPQL-EPEFVYGDYPHFH- G---HK---eNK ATAKK--F-FYSNIM-NFFKKD-- | 1041 |
| WP_002296423 | 982 | HHAHDAYLNAVIGKALLGVYPQL-EPEFVYGDYPHFH- G---HK---eNK ATAKK--F-FYSNIM-NFFKKD-- | 1041 |
| WP_002304487 | 996 | HHAHDAYLNAVIGKALLGVYPQL-EPEFVYGDYPHFH- G---HK---eNK ATAKK--F-FYSNIM-NFFKKG-- | 1055 |
| WP_002305844 | 982 | HHAHDAYLNAVIGKALLGVYPQL-EPEFVYGDYPHFH- G---HK---eNK ATAKK--F-FYSNIM-NFFKKD-- | 1041 |
| WP_002307203 | 982 | HHAHDAYLNAVIGKALLGVYPQL-EPEFVYGDYPHFH- G---HK---eNK ATAKK--F-FYSNIM-NFFKKD-- | 1041 |
| WP_002310390 | 982 | HHAHDAYLNAVIGKALLGVYPQL-EPEFVYGDYPHFH- G---HK---eNK ATAKK--F-FYSNIM-NFFKKD-- | 1041 |
| WP_002352408 | 982 | HHAHDAYLNAVIGKALLGVYPQL-EPEFVYGDYPHFH- G---HK---eNK ATAKK--F-FYSNIM-NFFKKD-- | 1041 |
| WP_012997688 | 982 | HHAHDAYLNAVIGKALLGVYPQL-EPEFVYGDYPHFH- G---HK---eNK ATAKK--F-FYSNIM-NFFKKD-- | 1041 |
| WP_014677909 | 982 | HHAHDAYLNAVIGKALLGVYPQL-EPEFVYGDYPHFH- G---HK---eNK ATAKK--F-FYSNIM-NFFKKD-- | 1041 |
| WP_019312892 | 982 | HHAHDAYLNAVIGKALLGVYPQL-EPEFVYGDYPHFH- G---HK---eNK ATAKK--F-FYSNIM-NFFKKD-- | 1041 |
| WP_019313659 | 982 | HHAHDAYLNAVIGKALLGVYPQL-EPEFVYGDYPHFH- G---HK---eNK ATAKK--F-FYSNIM-NFFKKD-- | 1041 |
| WP_019314093 | 982 | HHAHDAYLNAVIGKALLGVYPQL-EPEFVYGDYPHFH- G---HK---eNK ATAKK--F-FYSNIM-NFFKKD-- | 1041 |
| WP_019315370 | 982 | HHAHDAYLNAVIGKALLGVYPQL-EPEFVYGDYPHFH- G---HE---eNK ATAKK--F-FYSNIM-NFFKKD-- | 1041 |
| WP_019803776 | 982 | HHAHDAYLNAVIGKALLGVYPQL-EPEFVYGDYPHFH- G---HK---eNK ATAKK--F-FYSNIM-NFFKKD-- | 1041 |
| WP_019805234 | 982 | HHAHDAYLNAVIGKALLGVYPQL-EPEFVYGDYPHFH- G---HK---eNK ATAKK--F-FYSNIM-NFFKKD-- | 1041 |
| WP_024783594 | 982 | HHAHDAYLNAVIGKALLGVYPQL-EPEFVYGDYPHFH- G---HK---eNK ATAKK--F-FYSNIM-NFFKKD-- | 1041 |
| WP_024784288 | 984 | HHAHDAYLNAVVVKALLVKYPKL-EPEFVYGEYLKYN- S---YR---eRK ATQKM--F-FYSNIM-NMFKSKVK | 1046 |
| WP_024784666 | 982 | HHAHDAYLNAVIGKALLGVYPQL-EPEFVYGDYPHFH- G---HK---eNK ATAKK--F-FYSNIM-NFFKKD-- | 1041 |
| WP_024784894 | 982 | HHAHDAYLNAVIGKALLGVYPQL-EPEFVYGDYPHFH- G---HK---eNK ATAKK--F-FYSNIM-NFFKKD-- | 1041 |
| WP_024786433 | 984 | HHAHDAYLNAVVVKALLVKYPKL-EPEFVYGEYPKYN- S---YR---eRK ATQKM--F-FYSNIM-NMFKSKVK | 1046 |
| WP_049473442 | 982 | HHAHDAYLNAVIGKALLGVYPQL-EPEFVYGDYPHFH- G---HE---eNK ATAKK--F-FYSNIM-NFFKKD-- | 1041 |
| WP_049474547 | 982 | HHAHDAYLNAVIGKALLGVYPQL-EPEFVYGDYPHFH- G---HK---eNK ATAKK--F-FYSNIM-NFFKKD-- | 1041 |
| EMC03581 | 975 | HHAHDAYLNAVIGKALLGVYPQL-EPEFVYGDYPHFH- G---HK---eNK ATAKK--F-FYSNIM-NFFKKD-- | 1034 |
| WP_000428612 | 987 | HHAHDAYLNAVVAKAILKKYPKL-EPEFVYGDYQKYDL SkdpKEI---EK ATEKY--F-FYSNLL-NFFKEEVH | 1058 |
| WP_000428613 | 985 | HHAHDAYLNAVVAKAILKKYPKL-EPEFVYGDYQKYDL SrnpKEV---EK ATEKY--F-FYSNLL-NFFKEEVH | 1056 |
| WP_049523028 | 980 | HHAHDAYLNAVVAKAILKKYPKL-EPEFVYGDYQKYDL TkdpKEI---EK ATEKY--F-FYSNLL-NFFKDKVY | 1051 |
| WP_003107102 | 951 | HHAHDAYLNAVVGTALLKKYPKL-EAEFVYGDYKHYDL S---DTSl--GK ATAKM--F-FYSNIM-NFFKKEVR | 1020 |
| WP_054279288 | 983 | HHAHDAYLNAVVGTALLKMYPKL-ASEFVYGDYQKYDL S---GKAs--GH ATAKY--F-FYSNLM-NFFKSEVK | 1052 |
| WP_049531101 | 985 | HHAHDAYLNAVVAKAILKKYPKL-EPEFVYGDYQKYDL SrdpKEI---EK ATEKY--F-FYSNLL-NFFKEEVH | 1056 |
| WP_049538452 | 985 | HHAHDAYLNAVVAKAILKKYPKL-EPEFVYGDYQKYDL SkdpKDI---EK ATEKY--F-FYSNLL-NFFKEEVH | 1056 |
| WP_049549711 | 987 | HHAHDAYLNAVVAKAILKKYPKL-EPEFVYGDYQKNDL SkdpKDI---EK ATEKY--F-FYSNLL-NFFKEEVH | 1058 |
| WP_007896501 | 988 | HHAHDAYLNAVVGTALLKKYPKL-EAEFVYGDYKHFDL S---DPSl--GK ATAKV--F-FYSNIM-NFFKEELS | 1057 |
| EFR44625 | 940 | HHAHDAYLNAVVGTALLKKYPKL-EAEFVYGDYKHFDL S---DPSl--GK ATAKV--F-FYSNIM-NFFKEELS | 1009 |
| WP_002897477 | 984 | HHAHDAYLNAVVAKAILKKYPKL-EPEFVYGDYQKYDL FkpsKEI---EK ATEKY--F-FYSNLL-NFFKEEVL | 1055 |
| WP_002906454 | 984 | HHAHDAYLNAVVAKAILKKYPKL-EPEFVYGDYQKYDL SkasNTI---DK ATEKY--F-FYSNLL-NFFKEKVR | 1055 |
| WP_009729476 | 985 | HHAHDAYLNAVVAKAILKKYPKL-EPEFVYGDYQKYDL SkdpKEI---EK ATEKY--F-FYSNLL-NFFKEEVH | 1056 |
| CQR24647 | 984 | HHAHDAYLNAVVAKALLIRYPKL-EPEFVYGEYPKYN- S---YRE---RK ATEKM--F-FYSNIM-NMFKTTIK | 1046 |
| WP_000066813 | 989 | HHAHDAYLNAVLAKAILKKYPKL-EPEFVYGDYQKYDL SrepKEV---EK ATQKY--F-FYSNLL-NFFKEEVH | 1060 |
| WP_009754323 | 985 | HHAHDAYLNAVVAKAILKKYPKL-EPEFVYGDYQKYDL SkdpKEV---EK ATEKY--F-FYSNLL-NFFKEEVH | 1056 |
| WP_044674937 | 986 | HHAHDAYLNAVVATALLKKYPQL-APEFVYGDYPKYN- S---YKS---RK ATEKV--L-FYSNIM-NFFRRVLV | 1048 |
| WP_044676715 | 988 | HHAHDAYLNAVVATALLKKYPQL-APEFVYGDYPKYN- S---YKS---RK ATEKV--L-FYSNIM-NFFRRVLV | 1050 |
| WP_044680361 | 988 | HHAHDAYLNAVVATALLKKYPQL-APEFVYGDYPKYN- S---YKS---RK ATEKV--L-FYSNIM-NFFRRVLV | 1050 |
| WP_044681799 | 986 | HHAHDAYLNAVVATALLKKYPQL-APEFVYGDYPKYN- S---YKS---RK ATEKV--L-FYSNIM-NFFRRVLV | 1048 |
| WP_049533112 | 981 | HHAHDAYLNAVIGTALLKKYPKL-ASEFVYGEFKKYDV S---DK---eIG KATAK--YfFYSNLM-NFFKKEVK | 1050 |
| WP_029090905 | 952 | HHAQDAFLVAFLGTNITSNYPKI-EMEYLFKGYQHYLN ------Ev--GK AAKPKftF-IVENLS--------- | 1007 |
| WP_006506696 | 977 | HHAHDAYIVALIGGFMRDRYPNMhDSKAVYSEYMKMFR ----NKNd--QK -----g---FVINSM-NYPY-EV- | 1038 |
| AIT42264 | 982 | HHAHDAYLNAVVGTALIKKYPKL-ESEFVYGDYKVYDV S---EQEi--GK ATAKY--F-FYSNIM-NFFKTEIT | 1051 |
| WP_034440723 | 981 | HHAHDAYLNGVIALKLLELYPYM-AKDLIYGKYSYHRK G---------DK ATQAK--Y-KMSNII-ERFSQDL- | 1041 |
| AKQ21048 | 982 | HHAHDAYLNAVVGTALIKKYPKL-ESEFVYGDYKVYDV S---EQEi--GK ATAKY--F-FYSNIM-NFFKTEIT | 1051 |
| WP_004636532 | 981 | HHGHDAYLNAVVATTIMKVYPNL-KPQFVYGQYKKTSM ----FKE---EK ATARK--H-FYSNIT-KFFKKEKV | 1042 |
| WP_002364836 | 988 | HHGQDAYLNCVVATTLLKVYPNL-APEFVYGEYPKFQT ----FKE---NK ATAKA--I-IYTNLL-RFFTED-- | 1047 |
| WP_016631044 | 939 | HHGQDAYLNCVVATTLLKVYPNL-APEFVYGEYPKFQT ----FKE---NK ATAKA--I-IYTNLL-RFFTED-- | 998 |
| EMS75795 | 723 | HHAHDAYLNGVVAIALLKKYPKL-EPEFVYGNYTKFNL ----AT---eNK ATAKK--E-FYSNIL-RFFEKE-- | 782 |
| WP_002373311 | 988 | HHGQDAYLNCVVATTLLKVYPNL-APEFVYGEYPKFQA ----FKE---NK ATAKT--I-IYTNLM-RFFTED-- | 1047 |
| WP_002378009 | 988 | HHGQDAYLNCVVATTLLKVYPNL-APEFVYGEYPKFQT ----FKE---NK ATAKA--I-IYTNLL-RFFTED-- | 1047 |
| WP_002407324 | 988 | HHGQDAYLNCVVATTLLKVYPNL-APEFVYGEYPKFQT ----FKE---NK ATAKA--I-IYTNLL-RFFTED-- | 1047 |
| WP_002413717 | 988 | HHGQDAYLNCVVATTLLKVYPNL-APEFVYGEYPKFQT ----FKE---NK ATAKA--I-IYTNLL-RFFTED-- | 1047 |
| WP_010775580 | 990 | HHGQDAYLNCVVATTLLKVYPNL-APEFVYGEYPKFQA ----FKE---NK ATAKA--I-IYTNLL-RFFTED-- | 1049 |
| WP_010818269 | 988 | HHGQDAYLNCVVATTLLKVYPNL-APEFVYGEYPKFQT ----FKE---NK ATAKA--I-IYTNLL-RFFTED-- | 1047 |
| WP_010824395 | 988 | HHGQDAYLNCVVATTLLKVYPNL-APEFVYGEYPKFQT ----FKE---NK ATAKT--I-IYTNLM-RFFTED-- | 1047 |
| WP_016622645 | 988 | HHGQDAYLNCVVATTLLKVYPNL-APEFVYGEYPKFQT ----FKE---NK ATAKA--I-IYTNLL-RFFTED-- | 1047 |
| WP_033624816 | 988 | HHGQDAYLNCVVATTLLKVYPNL-APEFVYGEYPKFQA ----FKE---NK AMAKA--I-IYTNLL-RFFTED-- | 1047 |
| WP_033625576 | 988 | HHGQDAYLNCVVATTLLKVYPNL-APEFVYGEYPKFQA ----FKE---NK ATAKA--I-IYTNLM-RFFTEV-- | 1047 |
| WP_033789179 | 988 | HHGQDAYLNCVVATTLLKVYPNL-APEFVYGEYPKFQA ----FKE---NK ATAKA--I-IYTNLL-RFFTED-- | 1047 |
| WP_002310644 | 989 | HHAHDAYLNGVVALALLKKYPQL-APEFVYGEYLKFNA ----HK---aNK ATVKK--E-FYSNIM-KFFESD-- | 1048 |
| WP_002312694 | 990 | HHAHDAYLNGVVALALLKKYPQL-APEFVYGEYLKFNA ----HK---aNK ATVKK--E-FYSNIM-KFFESD-- | 1049 |
| WP_002314015 | 990 | HHAHDAYLNGVVALALLKKYPQL-APEFVYGEYLKFNA ----HK---aNK ATVKK--E-FYSNIM-KFFESD-- | 1049 |
| WP_002320716 | 990 | HHAHDAYLNGVVALALLKKYPQL-APEFVYGEYLKFNA ----HK---aNK ATVKK--E-FYSNIM-KFFESD-- | 1049 |
| WP_002330729 | 989 | HHAHDAYLNGVVALALLKKYPQL-APEFVYGEYLKFNA ----HK---aNK ATVKK--E-FYSNIM-KFFESD-- | 1048 |
| WP_002335161 | 990 | HHAHDAYLNGVVALALLKKYPQL-APEFVYGEYLKFNA ----HK---aNK ATVKK--E-FYSNIM-KFFESD-- | 1049 |
| WP_002345439 | 990 | HHAHDAYLNGVVALALLKKYPQL-APEFVYGEYLKFNA ----HK---aNK ATVKK--E-FYSNIM-KFFESD-- | 1049 |
| WP_034867970 | 980 | HHAHDAYLNGFIANVLLKRYPKL-APEFVYGKYVKYSL ----AR---eNK ATAKK--E-FYSNIL-KFLESD-- | 1039 |
| WP_047937432 | 990 | HHAHDAYLNGVIALALLKKYPQL-APEFVYGEYLKFNA ----HK---aNK ATVKK--E-FYSNIM-KFFESD-- | 1049 |
| WP_010720994 | 980 | HHAHDAYLNGFIANVLLKRYPKL-APEFVYGKYVKYSL ----AR---eNK ATAKK--E-FYSNIL-KFLESD-- | 1039 |
| WP_010737004 | 980 | HHAHDAYLNGFIANVLLKRYPKL-APEFVYGKYVKYSL ----AR---eNK ATAKK--E-FYSNIL-KFLESD-- | 1039 |
| WP_034700478 | 980 | HHAHDAYLNGFIANVLLKRYPKL-APEFVYGKYVKYSL ----AR---eNK ATAKK--E-FYSNIL-KFLESD-- | 1039 |
| WP_007209003 | 978 | HHAHDAYLNAVVALSLLRVYPQL-KPEFVYGEYGKNS- ----IHDg--NK ATIKK---qFYSNIT-RYFASK-- | 1037 |
| WP_023519017 | 974 | HHAHDAYLNGVVAMTLLKKYPKL-APEFVYGSYIKGDI ----NQ---iNK ATAKK--E-FYSNIM-KFFESE-- | 1033 |
| WP_010770040 | 986 | HHGHDAYLNGVVANSLLRVYPQL-QPEFVYGDYPKFNA ----YKA---NK ATAKK--Q-LYTNIM-KFFAED-- | 1045 |
| WP_048604708 | 983 | HHAHDAYLNGVVATALLKIYPQL-EPEFVYGEFHRFNA ----FKE---NK ATAKK--Q-FYSNLM-EFSKSD-- | 1042 |
| WP_010750235 | 983 | HHAHDAYLNAVVALALLKKYPRL-APEFVYGSFAKFHL ----VK---eNK ATAKK--E-FYSNIL-KFFEKE-- | 1042 |
| AII16583 | 1021 | HHAHDAYLNAVVGTALIKKYPKL-ESEFVYGDYKVYDV S---EQEi--GK ATAKY--F-FYSNIM-NFFKTEIT | 1090 |
| WP_029073316 | 988 | HHAHDAYIATILGTYIGHRFESL-DAKYIYGEYQKIFR ----NKNk--DK ---KDg---FILNSM-RNLYADK- | 1052 |
| WP_031589969 | 988 | HHAHDAYIATILGTYIGHRFESL-DAKYIYGEYKRIFR ----QKNk--GK ---NDg---FILNSM-RNIYADK- | 1052 |
| KDA45870 | 973 | HHAHDAYLNAVVANLIMAKYPEL-EPEFVYGKYRKTK- ----FKGl--GK ATAKN---tLYANVL-YFLKENEV | 1034 |
| WP_039099354 | 991 | HHAFDAYLTAFVGLYLLKRYPKL-KPYFVYGEYQKAS- ----QQ----DK ---RN--F----NFL-NGLKKD-- | 1043 |
| AKP02966 | 1000 | HHAQDAYLASFLGTYRLRRFPTD-EMLLMNGEYNKFYG -----KElysKK -SRKN-gF-IISPLV--------- | 1062 |
| WP_010991369 | 985 | HHAHDAYLNGVVANTLLKVYPQL-EPEFVYGDYHQFDW ----FKA---NK ATAKK--Q-FYTNIM-LFFAQK-- | 1044 |
| WP_033838504 | 985 | HHAHDAYLNGVVANTLLKVYPQL-EPEFVYGDYHQFDW ----FKA---NK ATAKK--Q-FYTNIM-LFFAQK-- | 1044 |
| EHN60060 | 988 | HHAHDAYLNGVVANTLLKVYPQL-EPEFVYGDYHQFDW ----FKA---NK ATAKK--Q-FYTNIM-LFFAQK-- | 1047 |
| EFR89594 | 754 | HHAHDAYLNGVVANTLLKVYPQL-EPEFVYGDYHQFDW ----FKA---NK ATAKK--Q-FYTNIM-LFFAQK-- | 813 |
| WP_038409211 | 985 | HHAHDAYLNGVVANTLLKVYPQL-EPEFVYGDYHQFDW ----FKA---NK ATAKK--Q-FYTNIM-RFFAKE-- | 1044 |
| EFR95520 | 604 | HHAHDAYLNGVVANTLLKVYPQL-EPEFVYGDYHQFDW ----FKA---NK ATAKK--Q-FYTNIM-RFFAKE-- | 663 |
| WP_003723650 | 985 | HHAHDAYLNGVVANTLLKVYPQL-EPEFVYGEYHQFDW ----FKA---NK ATAKK--Q-FYTNIM-LFFAQK-- | 1044 |
| WP_003727705 | 985 | HHAHDAYLNGVVANTLLKVYPQL-EPEFVYGEYHQFDW ----FKA---NK ATAKK--Q-FYTNIM-LFFAQK-- | 1044 |
| WP_003730785 | 985 | HHAHDAYLNGVVANTLLKVYPQL-EPEFVYGEYHQFDW ----FKA---NK ATAKK--Q-FYTNIM-LFFAQK-- | 1044 |
| WP_003733029 | 985 | HHAHDAYLNGVVANTLLKVYPQL-EPEFVYGEYHQFGW ----FKA---NK ATAKK--Q-FYTNIM-LFFAQK-- | 1044 |
| WP_003739838 | 985 | HHAHDAYLNGVVANTLLKVYPQL-EPEFVYGEYHQFDW ----FKA---NK ATAKK--Q-FYTNIM-LFFAQK-- | 1044 |
| WP_014601172 | 985 | HHAHDAYLNGVVANTLLKVYPQL-EPEFVYGEYHQFDW ----FKA---NK ATAKK--Q-FYTNIM-LFFGQK-- | 1044 |
| WP_023548323 | 985 | HHAHDAYLNGVVANTLLKVYPQL-EPEFVYGEYHQFDW ----FKA---NK ATAKK--Q-FYTNIM-LFFAQK-- | 1044 |
| WP_031665337 | 985 | HHAHDAYLNGVVANTLLKVYPQL-EPEFVYGEYHQFDW ----FKA---NK ATAKK--Q-FYTNIM-LFFAQK-- | 1044 |
| WP_031669209 | 985 | HHAHDAYLNGVVANTLLKVYPQL-EPEFVYGEYHQFDW ----FKA---NK ATAKK--Q-FYTNIM-LFFAQK-- | 1044 |
| WP_033920898 | 985 | HHAHDAYLNGVVANTLLKVYPQL-EPEFVYGEYHQFDW ----FKA---NK ATAKK--Q-FYTNIM-LFFAQK-- | 1044 |
| AKI42028 | 988 | HHAHDAYLNGVVANTLLKVYPQL-EPEFVYGEYHQFDW ----FKA---NK ATAKK--Q-FYTNIM-LFFGQK-- | 1047 |
| AKI50529 | 988 | HHAHDAYLNGVVANTLLKVYPQL-EPEFVYGEYHQFDW ----FKA---NK ATAKK--Q-FYTNIM-LFFAQK-- | 1047 |
| EFR83390 | 433 | HHAHDAYLNGVVANTLLKVYPQL-EPEFVYGEYHQFDW ----FKA---NK ATAKK--Q-FYTNIM-LFFAQK-- | 492 |
| WP_046323366 | 985 | HHAHDAYLNCVVANTLLKVYPQL-EPEFVYGDYHQFDW ----FKA---NK ATAKK--Q-FYTNIM-LFFAKK-- | 1044 |
| AKE81011 | 998 | HHAHDAYLNAVVGTALIKKYPKL-ESEFVYGDYKVYDV S---EQEi--GK ATAKY--F-FYSNIM-NFFKTEIT | 1067 |
| CUO82355 | 981 | HHAHDAYIVALIGGFMRDRYPNMhDSKAVYSEYMKMFR ----NKNd--QK -----g---FVINSM-NYPY-EV- | 1042 |
| WP_033162887 | 983 | HHAHDAYIACIVGQFMHQNFEHL-DAKIIYGQYK---- -----KNy--KK ---NYg---FILNSM-NHLQSDI- | 1042 |
| AGZ01981 | 1015 | HHAHDAYLNAVVGTALIKKYPKL-ESEFVYGDYKVYDV S---EQEi--GK ATAKY--F-FYSNIM-NFFKTEIT | 1084 |
| AKA60242 | 982 | HHAHDAYLNAVVGTALIKKYPKL-ESEFVYGDYKVYDV S---EQEi--GK ATAKY--F-FYSNIM-NFFKTEIT | 1051 |
| AKS40380 | 982 | HHAHDAYLNAVVGTALIKKYPKL-ESEFVYGDYKVYDV S---EQEi--GK ATAKY--F-FYSNIM-NFFKTEIT | 1051 |
| 4UN5_B | 986 | HHAHDAYLNAVVGTALIKKYPKL-ESEFVYGDYKVYDV S---EQEi--GK ATAKY--F-FYSNIM-NFFKTEIT | 1055 |
| WP_010922251 | 1052 | [chemical structure] | 1114 |
| WP_039695303 | 1059 | YAD-GTVFERPIIE T-NAD-GE-IAWNKQIDFEKVRKVLS-YPQVNIVKKVETQT GGFSK ESIL-PKG- | 1120 |
| WP_045635197 | 1056 | YAD-GTIVKRENIE Y-SKDtGE-IAWNKEKDFAIIKKVLS-LPQVNIVKKREVQT GGFSK ESIL-PKG- | 1118 |
| 5AXW_A | 772 | YKYsHRVDKKPNRE VNNLN-GL---YDKDND--KLKKLINkSPEKLLMYHHDPQT --YQK KLIMeQYGd | 852 |
| WP_009880683 | 736 | LAN-GEIRKRPLIE TNGET-GE-IVWDKGRDFATVRKVLS-MPQVNIVKKTEVQT GGFSK ESIL-PKR- | 798 |
| WP_010922251 | 1052 | LAN-GEIRKRPLIE TNGET-GE-IVWDKGRDFATVRKVLS-MPQVNIVKKTEVQT GGFSK ESIL-PKR- | 1114 |
| WP_011054416 | 1052 | LAN-GEIRKRPLIE TNGET-GE-IVWDKGRDFATVRKVLS-MPQVNIVKKTEVQT GGFSK ESIL-PKR- | 1114 |
| WP_011284745 | 1052 | LAN-GEIRKRPLIE TNGET-GE-IVWDKGRDFATVRKVLS-MPQVNIVKKTEVQT GGFSK ESIL-PKR- | 1114 |
| WP_011285506 | 1052 | LAN-GEIRKRPLIE TNGET-GE-IVWDKGRDFATVRKVLS-MPQVNIVKKTEVQT GGFSK ESIL-PKR- | 1114 |
| WP_011527619 | 1052 | LAN-GEIRKRPLIE TNGET-GE-IVWDKGRDFATVRKVLS-MPQVNIVKKTEVQT GGFSK ESIL-PKR- | 1114 |
| WP_012560673 | 1052 | LAN-GEIRKRPLIE TNGET-GE-IVWDKGRDFATVRKVLS-MPQVNIVKKTEVQT GGFSK ESIL-PKR- | 1114 |
| WP_014407541 | 1051 | LAN-GEIRKRPLIE TNGET-GE-IVWDKGRDFATVRKVLS-MPQVNIVKKTEVQT GGFSK ESIL-PKR- | 1113 |
| WP_020905136 | 1052 | LAN-GEIRKRPLIE TNGET-GE-IVWDKGRDFATVRKVLS-MPQVNIVKKTEVQT GGFSK ESIL-PKR- | 1114 |
| WP_023080005 | 1051 | LAN-GEIRKRPLIE TNGET-GE-IVWDKGRDFATVRKVLS-MPQVNIVKKTEVQT GGFSK ESIL-PKR- | 1113 |
| WP_023610282 | 1051 | LAN-GEIRKRPLIE TNGET-GE-IVWDKGRDFATVRKVLS-MPQVNIVKKTEVQT GGFSK ESIL-PKR- | 1113 |
| WP_030125963 | 1052 | LAN-GEIRKRPLIE TNGET-GE-IVWDKGRDFATVRKVLS-MPQVNIVKKTEVQT GGFSK ESIL-PKR- | 1114 |
| WP_030126706 | 1052 | LAN-GEIRKRPLIE TNGET-GE-IVWDKGRDFATVRKVLS-MPQVNIVKKTEVQT GGFSK ESIL-PKR- | 1114 |
| WP_031488318 | 1052 | LAN-GEIRKRPLIE TNGET-GE-IVWDKGRDFATVRKVLS-MPQVNIVKKTEVQT GGFSK ESIL-PKR- | 1114 |
| WP_032460140 | 1052 | LAN-GEIRKRPLIE TNGET-GE-IVWDKGRDFATVRKVLS-MPQVNIVKKTEVQT GGFSK ESIL-PKR- | 1114 |
| WP_032461047 | 1052 | LAN-GEIRKRPLIE TNGET-GE-IVWDKGRDFATVRKVLS-MPQVNIVKKTEVQT GGFSK ESIL-PKR- | 1114 |
| WP_032462016 | 1052 | LAN-GEIRKRPLIE TNGET-GE-IVWDKGRDFATVRKVLS-MPQVNIVKKTEVQT GGFSK ESIL-PKR- | 1114 |
| WP_032462936 | 1052 | LAN-GEIRKRPLIE TNGET-GE-IVWDKGRDFATVRKVLS-MPQVNIVKKTEVQT GGFSK ESIL-PKR- | 1114 |
| WP_032464890 | 1052 | LAN-GEIRKRPLIE TNGET-GE-IVWDKGRDFATVRKVLS-MPQVNIVKKTEVQT GGFSK ESIL-PKR- | 1114 |
| WP_033888930 | 877 | LAN-GEIRKRPLIE TNGET-GE-IVWDKGRDFATVRKVLS-MPQVNIVKKTEVQT GGFSK ESIL-PKR- | 939 |
| WP_038431314 | 1052 | LAN-GEIRKRPLIE TNGET-GE-IVWDKGRDFATVRKVLS-MPQVNIVKKTEVQT GGFSK ESIL-PKR- | 1114 |
| WP_038432938 | 1051 | LAN-GEIRKRPLIE TNGET-GE-IVWDKGRDFATVRKVLS-MPQVNIVKKTEVQT GGFSK ESIL-PKR- | 1113 |
| WP_038434062 | 1052 | LAN-GEIRKRPLIE TNGET-GE-IVWDKGRDFATVRKVLS-MPQVNIVKKTEVQT GGFSK ESIL-PKR- | 1114 |
| BAQ51233 | 963 | LAN-GEIRKRPLIE TNGET-GE-IVWDKGRDFATVRKVLS-MPQVNIVKKTEVQT GGFSK ESIL-PKR- | 1025 |
| KGE60162 | 227 | LAN-GEIRKRPLIE TNGET-GE-IVWDKGRDFATVRKVLS-MPQVNIVKKTEVQT GGFSK ESIL-PKR- | 289 |
| KGE60856 | 1 | ------------IE TNGET-GE-IVWDKGRDFATVRKVLS-MPQVNIVKKTEVQT GGFSK ESIL-PKR- | 52 |
| WP_002989955 | 1052 | LAN-GEIRKRPLIE TNGET-GE-IVWDKGRDFATVRKVLS-MPQVNIVKKTEVQT GGFSK ESIL-PKR- | 1114 |
| WP_003030002 | 1042 | -----------DIQ T-NED-GE-IAWNKEKHIKILRKVLS-YPQVNIVKKTEEQT GGFSK ESIL-PKG- | 1093 |
| WP_003065552 | 1059 | YSN-GKVIVRPVVE Y-SKD-TEdIAWDKKSNFRTICKVLS-YPQVNIVKKVETQT GGFSK ESIL-PKG- | 1121 |
| WP_001040076 | 1050 | LAD-GTVVVKDDIE VNNDT-GE-IVWDKKKHFATVRKVLS-YPQVNIVKKTEIQT GGFSK ESIL-AHG- | 1112 |
| WP_001040078 | 1058 | LAD-GSIVVRPVIE TGRYM-GK-TAWDKKKHFATVRKVLS-YPQVNIVKKTEIQT GGFSK ESIL-AHG- | 1120 |
| WP_001040080 | 1050 | LAD-GTVVVKDDIE VNNDT-GE-IVWDKKKHFATVRKVLS-YPQNNIVKKTEIQT GGFSK ESIL-AHG- | 1112 |
| WP_001040081 | 1050 | LAD-GTVVVKDDIE VNNDT-GE-IVWDKKKHFATVRKVLS-YPQNNIVKKTEIQT GGFSK ESIL-AHG- | 1112 |
| WP_001040083 | 1050 | LAD-GTVVVKDDIE VNNDT-GE-IVWDKKKHFATVRKVLS-YPQNNIVKKTEIQT GGFSK ESIL-AHG- | 1112 |
| WP_001040085 | 1050 | LAD-GTVVVKDDIE VNNDT-GE-IVWDKKKHFATVRKVLS-YPQNNIVKKTEIQT GGFSK ESIL-AHG- | 1112 |
| WP_001040087 | 1050 | LAD-GTVVVKDDIE VNNDT-GE-IVWDKKKHFATVRKVLS-YPQNNIVKKTEIQT GGFSK ESIL-AHG- | 1112 |
| WP_001040088 | 1050 | LAD-GTVVVKDDIE VNNDT-GE-IVWDKKKHFATVRKVLS-YPQNNIVKKTEIQT GGFSK ESIL-AHG- | 1112 |
| WP_001040089 | 1050 | LAD-GTVVVKDDIE VNNDT-GE-IVWDKKKHFATVRKVLS-YPQNNIVKKTEIQT GGFSK ESIL-AHG- | 1112 |
| WP_001040090 | 1050 | LAD-GTVVVKDDIE VNNDT-GE-IVWDKKKHFATVRKVLS-YPQNNIVKKTEIQT GGFSK ESIL-AHG- | 1112 |
| WP_001040091 | 1050 | LAD-GTVVVKDDIE VNNDT-GE-IVWDKKKHFATVRKVLS-YPQNNIVKKTEIQT GGFSK ESIL-AHG- | 1112 |
| WP_001040092 | 1050 | LAD-ETVVVKDDIE VNNET-GE-IAWDKKKHFATVRKVLS-YPQVNIVKKTEVQT GGFSK ESIL-AHS- | 1112 |
| WP_001040094 | 1050 | LAD-GTVVVKDDIE VNNDT-GE-IVWDKKKHFATVRKVLS-YPQVNIVKKTEIQT GGFSK ESIL-AHG- | 1112 |
| WP_001040095 | 1050 | LAD-GTVVVKDDIE VNNDT-GE-IVWDKKKHFATVRKVLS-YPQVNIVKKTEVQT GGFSK ESIL-AHG- | 1112 |
| WP_001040096 | 1050 | LAD-GTVVVKDDIE VNNDT-GE-IVWDKKKHFATVRKVLS-YPQVNIVKKTEVQT GGFSK ESIL-AHG- | 1112 |
| WP_001040097 | 1050 | LAD-GTVVVKDDIE VNNDT-GE-IVWDKKKHFATVRKVLS-YPQVNIVKKTEIQT GGFSK ESIL-AHG- | 1112 |
| WP_001040098 | 1050 | LAD-GTVVVKDDIE VNNDT-GE-IVWDKKKHFATVRKVLS-YPQVNIVKKTEIQT GGFSK ESIL-AHG- | 1112 |
| WP_001040099 | 1050 | LAD-GTVVVKDDIE VNNDT-GE-IVWDKKKHFATVRKVLS-YPQVNIVKKTEIQT GGFSK ESIL-AHG- | 1112 |
| WP_001040100 | 1050 | LAD-GTVVVKDDIE VNNDT-GE-IVWDKKKHFATVRKVLS-YPQVNIVKKTEIQT GGFSK ESIL-AHG- | 1112 |
| WP_001040104 | 1050 | LAD-GTVVVKDDIE VNNDT-GE-IVWDKKKHFATVRKVLS-YPQNNIVKKTEIQT GGFSK ESIL-AHG- | 1112 |
| WP_001040105 | 1050 | LAD-GTVVVKDDIE VNNDT-GE-IVWDKKKHFATVRKVLS-YPQNNIVKKTEIQT GGFSK ESIL-AHG- | 1112 |
| WP_001040106 | 1050 | LAD-GTVVVKDDIE VNNDT-GE-IVWDKKKHFATVRKVLS-YPQVNIVKKTEIQT GGFSK ESIL-AHG- | 1112 |
| WP_001040107 | 1050 | LAD-GTVVVKDDIE VNNDT-GE-IVWDKKKHFATVRKVLS-YPQVNIVKKTEIQT GGFSK ESIL-AHG- | 1112 |
| WP_001040108 | 1050 | LAD-GTVVVKDDIE VNNDT-GE-IVWDKKKHFATVRKVLS-YPQVNIVKKTEIQT GGFSK ESIL-AHG- | 1112 |
| WP_001040109 | 1050 | LAD-GTVVVKDDIE VNNDT-GE-IVWDKKKHFATVRKVLS-YPQVNIVKKTEIQT GGFSK ESIL-AHG- | 1112 |
| WP_001040110 | 1050 | LAD-GTVVVKDDIE VNNDT-GE-IVWDKKKHFATVRKVLS-YPQVNIVKKTEIQT GGFSK ESIL-AHG- | 1112 |
| WP_015058523 | 1050 | LAD-ETVVVKDDIE VNNET-GE-IAWDKKKHFATVRKVLS-YPQVNIVKKTEVQT GGFSK ESIL-AHS- | 1112 |
| WP_017643650 | 1050 | LAD-GTVVVKDDIE VNNDT-GE-IVWDKKKHFATVRKVLS-YPQVNIVKKTEIQT GGFSK ESIL-AHG- | 1112 |
| WP_017647151 | 1050 | LAD-GTVVVKDDIE VNNDT-GE-IVWDKKKHFATVRKVLS-YPQVNIVKKTEIQT GGFSK ESIL-AHG- | 1112 |
| WP_017648376 | 1050 | LAD-GTVVVKDDIE VNNDT-GE-IVWDKKKHFATVRKVLS-YPQVNIVKKTEIQT GGFSK ESIL-AHG- | 1112 |
| WP_017649527 | 1050 | LAD-GTVVVKDDIE VNNDT-GE-IVWDKKKHFATVRKVLS-YPQNNIVKKTEIQT GGFSK ESIL-AHG- | 1112 |
| WP_017771611 | 1050 | LAD-GTVVVKDDIE VNNDT-GE-IVWDKKKHFATVRKVLS-YPQVNIVKKTEIQT GGFSK ESIL-AHG- | 1112 |
| WP_017771984 | 1050 | LAD-GTVVVKDDIE VNNDT-GE-IVWDKKKHFATVRKVLS-YPQNNIVKKTEIQT GGFSK ESIL-AHG- | 1112 |
| CFQ25032 | 1050 | LAD-GTVVVKDDIE VNNDT-GE-IVWDKKKHFATVRKVLS-YPQNNIVKKTEIQT GGFSK ESIL-AHG- | 1112 |
| CFV16040 | 1050 | LAD-GTVVVKDDIE VNNDT-GE-IVWDKKKHFATVRKVLS-YPQNNIVKKTEIQT GGFSK ESIL-AHG- | 1112 |
| KLJ37842 | 1050 | LAD-GTVVVKDDIE VNNDT-GE-IVWDKKKHFATVRKVLS-YPQNNIVKKTEIQT GGFSK ESIL-AHG- | 1112 |
| KLJ72361 | 1050 | LAD-GTVVVKDDIE VNNDT-GE-IVWDKKKHFATVRKVLS-YPQNNIVKKTEIQT GGFSK ESIL-AHG- | 1112 |
| KLL20707 | 1064 | LAD-GTVVVKDDIE VNNDT-GE-IVWDKKKHFATVRKVLS-YPQNNIVKKTEIQT GGFSK ESIL-AHG- | 1126 |
| KLL42645 | 1050 | LAD-GTVVVKDDIE VNNDT-GE-IVWDKKKHFATVRKVLS-YPQVNIVKKTEIQT GGFSK ESIL-AHG- | 1112 |
| WP_047207273 | 1050 | LAD-GTVVVKDDIE VNNDT-GE-IVWDKKKHFATVRKVLS-YPQNNIVKKTEIQT GGFSK ESIL-AHG- | 1112 |
| WP_047209694 | 1050 | LAD-GTVVVKDDIE VNNDT-GE-IVWDKKKHFATVRKVLS-YPQVNIVKKTEIQT GGFSK ESIL-AHG- | 1112 |
| WP_050198062 | 1050 | LAD-GTVVIKDDIE VNNDT-GE-IVWDKKKHFATVRKVLS-YPQNNIVKKTEIQT GGFSK ESIL-AHG- | 1112 |
| WP_050201642 | 1050 | LAD-GTVVVKDDIE VNNDT-GE-IVWDKKKHFATVRKVLS-YPQNNIVKKTEIQT GGFSK ESIL-AHG- | 1112 |
| WP_050204027 | 1050 | LAD-GTVVVKDDIE VNNDT-GE-IVWDKKKHFATVRKVLS-YPQVNIVKKTEIQT GGFSK ESIL-AHG- | 1112 |
| WP_050881965 | 1050 | LAD-GTVVVKDDIE VNNDT-GE-IVWDKKKHFATVRKVLS-YPQNNIVKKTEIQT GGFSK ESIL-AHG- | 1112 |
| WP_050886065 | 1050 | LAD-GTVVVKDDIE VNNDT-GE-IVWDKKKHFATVRKVLS-YPQNNIVKKTEIQT GGFSK ESIL-AHG- | 1112 |
| AHN30376 | 1050 | LAD-ETVVVKDDIE VNNET-GE-IAWDKKKHFATVRKVLS-YPQVNIVKKTEVQT GGFSK ESIL-AHS- | 1112 |
| EAO78426 | 1050 | LAD-GTVVVKDDIE VNNDT-GE-IVWDKKKHFATVRKVLS-YPQNNIVKKTEIQT GGFSK ESIL-AHG- | 1112 |
| CCW42055 | 1050 | LAD-GTVVVKDDIE VNNDT-GE-IVWDKKKHFATVRKVLS-YPQNNIVKKTEIQT GGFSK ESIL-AHG- | 1112 |
| WP_003041502 | 1051 | FAD-GTVVERPDIE T-SED-GE-IAWNKQTDFKIVRKVLS-YPQVNIVKKTEVQT HGLDR PSPK-PKP- | 1122 |
| WP_037593752 | 1043 | -----------DIQ T-NED-GE-IAWNKEKHIKILRKVLS-YPQVNIVKKTEEQT GGFSK ESIL-PKG- | 1094 |
| WP_049516684 | 1043 | -----------DIQ T-NED-GE-IAWNKEKHIKILRKVLS-YPQVNIVKKTEEQT GGFSK ESIL-PKG- | 1094 |
| GAD46167 | 1042 | -----------DIQ T-NED-GE-IAWNKEKHIKILRKVLS-YPQVNIVKKTEEQT GGFSK ESIL-PKG- | 1093 |
| WP_018363470 | 1063 | YSN-GKVIVRPVVE Y-SKDtGE-IAWNKRTDFEKVRKVLS-YPQVNIVKKVETQT GGFSK ESIL-PKG- | 1125 |
| WP_003043819 | 1061 | LAN-GEIRKRPLIE TNGET-GE-VVWNKEKDFATVRKVLA-MPQVNIVKKTEVQT GGFSK ESIL-SKR- | 1123 |
| WP_006269658 | 1042 | -----------DIQ T-NED-GE-IAWNKEKHIKILRKVLS-YPQVNIVKKTEEQT GGFSK ESIL-PKG- | 1093 |
| WP_048800889 | 1052 | FAD-GTVVERPDIE T-SED-GE-IAWNKQTDFKIVRKVLS-YPQVNIVKKVEKQT GRFSK ESIL-PKG- | 1113 |
| WP_012767106 | 1051 | LAN-GEIRKRPLIE TNEET-GE-IVWDKGRDFATVRKVLS-MPQVNIVKKTEVQT GALTN ESIY-ARG- | 1113 |
| WP_014612333 | 1051 | LAN-GEIRKRPLIE TNEET-GE-IVWDKGRDFATVRKVLS-MPQVNIVKKTEVQT GALTN ESIY-ARG- | 1113 |
| WP_015017095 | 1051 | LAN-GEIRKRPLIE TNEET-GE-IVWNKGRDFATVRKVLS-MPQVNIVKKTEVQT GALTN ESIY-ARG- | 1113 |
| WP_015057649 | 1051 | LAN-GEIRKRPLIE TNEET-GE-IVWDKGRDFATVRKVLS-MPQVNIVKKTEVQT GALTN ESIY-ARG- | 1113 |
| WP_048327215 | 1051 | LAN-GEIRKRPLIE TNEET-GE-IVWDKGRDFATVRKVLS-MPQVNIVKKTEVQT GALTN ESIY-ARG- | 1113 |
| WP_049519324 | 1051 | LAN-GEIRKRPLIE TNEET-GE-IVWDKGRDFATVRKVLS-MPQVNIVKKTEVQT GALTN ESIY-ARG- | 1113 |
| WP_012515931 | 1044 | L------------H VNSD--GE-EIWNANKHLPIIKNVLS-IPQVNIVKKTEVQT GGFYK ESIL-SKG- | 1094 |
| WP_021320964 | 1044 | L------------H VNSD--GE-EIWNANKHLPIIKNVLS-IPQVNIVKKTEVQT GGFYK ESIL-SKG- | 1094 |
| WP_037581760 | 1044 | L------------H VNSD--GE-EIWNANKHLPIIKNVLS-IPQVNIVKKTEVQT GGFYK ESIL-SKG- | 1094 |
| WP_004232481 | 1062 | YAD-GRVFERPDIE T-NAD-GE-VVWNKQRDFNIVRKVLS-YPQVNIVKKVEVQT GGFSK ESIL-PKG- | 1123 |
| WP_009854540 | 1057 | YAD-GTVFERPIIE T-NAD-GE-IAWNKQIDFEKVRKVLS-YPQVNIVKKVETQT GGFSK ESIL-PKG- | 1118 |
| WP_012962174 | 1057 | YSN-GKVVVRPVIE C-SKDtGE-IAWNKQTDFEKVRRVLS-YPQVNIVKKVETQT GGFSK ESIL-PKG- | 1119 |
| WP_039695303 | 1059 | YAD-GTVFERPIIE T-NAD-GE-IAWNKQIDFEKVRKVLS-YPQVNIVKKVETQT GGFSK ESIL-PKG- | 1120 |
| WP_014334983 | 1062 | YAD-GRVFERPDIE T-NAD-GE-VVWNKQKDFDIVRKVLS-YPQVNIVKKVEAQT GGFSK ESIL-SKG- | 1123 |
| WP_003099269 | 1052 | LAD-DTIFTRPQIE VNTET-GE-IVWDKVKDMQTIRKVMS-YPQVNIVMKTEVQT GGFSK ESIW-PKG- | 1114 |
| AHY15608 | 1052 | LAD-DTIFTRPQIE VNTET-GE-IVWDKVKDMQTIRKVMS-YPQVNIVMKTEVQT GGFSK ESIW-PKG- | 1114 |
| AHY17476 | 1052 | LAD-DTIFTRPQIE VNTET-GE-IVWDKVKDMQTIRKVMS-YPQVNIVMKTEVQT GGFSK ESIW-PKG- | 1114 |
| ESR09100 | | -------------- ----------------------------------------- ----- --------- | |
| AGM98575 | 1052 | LAD-DTIFTRPQIE VNTET-GE-IVWDKVKDMQTIRKVMS-YPQVNIVMKTEVQT GGFSK ESIW-PKG- | 1114 |
| ALF27331 | 1042 | -----------DVR T-DKN-GE-IIWKKDEHISNIKKVLS-YPQVNIVKKVEEQT GGFSK ESIL-PKG- | 1093 |
| WP_018372492 | 1056 | --K----------K --DQEtGE-IVWDKKEIENIVKKVIY-SSPVNIVKKREEQS GALFK QSNM-AVGy | 1108 |
| WP_045618028 | 1057 | YAD-GTIVKRENIE Y-SKDtGE-IAWNKEKDFATIKKVLS-LPQVNIVKKTEEQT GGLFD NNIV-SKKk | 1124 |
| WP_045635197 | 1056 | YAD-GTIVKRENIE Y-SKDtGE-IAWNKEKDFAIIKKVLS-LPQVNIVKKREVQT GGFSK ESIL-PKG- | 1118 |
| WP_002263549 | 1042 | -----------DVR T-DKN-GE-IIWKKDEHISNIKKVLS-YPQVNIVKKVEEQT GGFSK ESIL-PKG- | 1093 |
| WP_002263887 | 1042 | -----------DVR T-DKN-GE-IIWKKDEHISNIKKVLS-YPQVNIVKKVEEQT GGFSK ESIL-PKG- | 1093 |
| WP_002264920 | 1042 | -----------DVR T-DKN-GE-IIWKKDEYISNIKKVLS-YPQVNIVKKVEEQT GGFSK ESIL-PKG- | 1093 |
| WP_002269043 | 1042 | -----------DVR T-DKN-GE-IIWKKDEHISNIKKVLS-YPQVNIVKKVEEQT GGFSK ESIL-PKG- | 1093 |
| WP_002269448 | 1042 | -----------DVR T-DKN-GE-IIWKKDEHISNIKKVLS-YPQVNIVKKVEEQT GGFSK ESIL-PKG- | 1093 |
| WP_002271977 | 1042 | -----------DVR T-DKN-GE-IIWKKDEHISNIKKVLS-YPQVNIVKKVEEQT GGFSK ESIL-PKG- | 1093 |
| WP_002272766 | 1042 | -----------DVR T-DKN-GE-IIWKKDEHISNIKKVLS-YPQVNIVKKVEEQT GGFSK ESIL-PKG- | 1093 |
| WP_002273241 | 1042 | -----------DVR T-DKN-GE-IIWKKDEHISNIKKVLS-YPQVNIVKKVEEQT GGFSK ESIL-PKG- | 1093 |
| WP_002275430 | 1042 | -----------DVR T-DKN-GE-IIWKKDEHISNIKKVLS-YPQVNIVKKVEEQT GGFSK ESIL-PKG- | 1093 |
| WP_002276448 | 1042 | -----------DVR T-DRN-GE-IIWKKDEHISNIKKVLS-YPQVNIVKKVEEQT GGFSK ESIL-PKG- | 1093 |
| WP_002277050 | 1047 | LAD-DQIVERPMIE VNDET-GE-IAWDKTKHITTVKKVLS-YPQVNIVKKVEEQT GGLFD -----PKS- | 1111 |
| WP_002277364 | 1042 | -----------DVR T-DKN-GE-IIWKKDEHISNIKKVLS-YPQVNIVKKVEEQT GGFSK ESIL-PKG- | 1093 |
| WP_002279025 | 1042 | -----------DVR T-DKN-GE-IIWKKDEHISNIKKVLS-YPQVNIVKKVEEQT GGFSK ESIL-PKG- | 1093 |
| WP_002279859 | 1042 | -----------DVR T-DKN-GE-IIWKKDEYISNIKKVLS-YPQVNIVKKVEEQT GGFSK ESIL-PKG- | 1093 |
| WP_002280230 | 1042 | -----------DVR T-DKN-GE-IIWKKDEHISNIKKVLS-YPQVNIVKKVEEQT GGFSK ESIL-PKG- | 1093 |
| WP_002281696 | 1042 | -----------DVR T-DKN-GE-IIWKKDEHISNIKKVLS-YPQVNIVKKVEEQT GGFSK ESIL-PKG- | 1093 |
| WP_002282247 | 1047 | LAD-DQIVERPMIE VNDET-GE-IAWDKTKHITTVKKVLS-YPQVNIVKKVEEQT GGLFD -----PKS- | 1111 |
| WP_002282906 | 1042 | -----------DVR I-DKN-GE-IIWKKDEHISNIKKVLS-YPQVNIVKKVEEQT GGFSK ESIL-PKG- | 1093 |
| WP_002283846 | 1042 | -----------DVR T-DKN-GE-IIWKKDEHISNIKKVLS-YPQVNIVKKVEEQT GGFSK ESIL-PKG- | 1093 |
| WP_002287255 | 1042 | -----------DVR T-DKN-GE-IIWKKDEHISNIKKVLS-YPQVNIVKKVEEQT GGFSK ESIL-PKG- | 1093 |
| WP_002288990 | 1042 | -----------DVR T-DKN-GE-IIWKKDEHISNIKKVLS-YPQVNIVKKVEEQT GGFSK ESIL-PKG- | 1093 |
| WP_002289641 | 1042 | -----------DVR T-DKN-GE-IIWKKDEHISNIKKVLS-YPQVNIVKKVEEQT GGFSK ESIL-PKG- | 1093 |
| WP_002290427 | 1042 | -----------DVR T-DKN-GE-IIWKKDEYISNIKKVLS-YPQVNIVKKVEEQT GGFFK ESIL-PKG- | 1093 |
| WP_002295753 | 1042 | -----------DVR T-DKN-GE-IIWKKDEYISNIKKVLS-YPQVNIVKKVEEQT GGFSK ESIL-PKG- | 1093 |
| WP_002296423 | 1042 | -----------DVR T-DKN-GE-IIWKKDEHISNIKKVLS-YPQVNIVKKVEEQT GGFSK ESIL-PKG- | 1093 |
| WP_002304487 | 1056 | -----------DVR T-DKN-GE-IIWKKDEHISNIKKVLS-YPQVNIVKKVEEQT GGFSK ESIL-PKG- | 1107 |
| WP_002305844 | 1042 | -----------DVR T-DKN-GE-IIWKKDEHISNIKKVLS-YPQVNIVKKVEEQT GGFSK ESIL-PKG- | 1093 |
| WP_002307203 | 1042 | -----------DVR T-DKN-GE-IIWKKDEYISNIKKVLS-YPQVNIVKKVEEQT GGFSK ESIL-PKG- | 1093 |
| WP_002310390 | 1042 | -----------DVR T-DKN-GE-IIWKKDEYISNIKKVLS-YPQVNIVKKVEEQT GGFFK ESIL-PKG- | 1093 |
| WP_002352408 | 1042 | -----------DVR T-DKN-GE-IIWKKDEYISNIKKVLS-YPQVNIVKKVEEQT GGFSK ESIL-PKG- | 1093 |
| WP_012997688 | 1042 | -----------DVR T-DKN-GE-IIWKKDEHISNIKKVLS-YPQVNIVKKVEEQT GGFSK ESIL-PKG- | 1093 |
| WP_014677909 | 1042 | -----------DVR T-DKN-GE-IIWKKDEHISNIKKVLS-YPQVNIVKKVEEQT GGFSK ESIL-PKG- | 1093 |
| WP_019312892 | 1042 | -----------DVR T-DKN-GE-IIWKKDEHISNIKKVLS-YPQVNIVKKVEEQT GGFSK ESIL-PKG- | 1093 |
| WP_019313659 | 1042 | -----------DVR T-DKN-GE-IIWKKDEHISNIKKVLS-YPQVNIVKKVEEQT GGFSK ESIL-PKG- | 1093 |
| WP_019314093 | 1042 | -----------DVR T-DKN-GE-IIWKKDEYISNIKKVLS-YPQVNIVKKVEEQT GGFSK ESIL-PKG- | 1093 |
| WP_019315370 | 1042 | -----------DVR T-DKN-GE-IIWKKDEHISNIKKVLS-YPQVNIVKKVEEQT GGFSK ESIL-PKG- | 1093 |
| WP_019803776 | 1042 | -----------DVR T-DKN-GE-IIWKKDEHISNIKKVLS-YPQVNIVKKVEEQT GGFSK ESIL-PKG- | 1093 |
| WP_019805234 | 1042 | -----------DVR T-DKN-GE-IIWKKDEYISNIKKVLS-YPQVNIVKKVEEQT GGFFK ESIL-PKG- | 1093 |
| WP_024783594 | 1042 | -----------DVR T-DKN-GE-IIWKKDEHISNIKKVLS-YPQVNIVKKVEEQT GGFSK ESIL-PKG- | 1093 |
| WP_024784288 | 1047 | LAD-DQIVERPMIE VNDET-GE-IAWDKTKHITTVKKVLS-YPQVNIVKKVEEQT GGLFD -----PKS- | 1111 |
| WP_024784666 | 1042 | -----------DVR T-DKN-GE-IIWKKDEHISNIKKVLS-YPQVNIVKKVEEQT GGFSK ESIL-PKG- | 1093 |
| WP_024784894 | 1042 | -----------DVR T-DKN-GE-IIWKKDEHISNIKKVLS-YPQVNIVKKVEEQT GGFSK ESIL-PKG- | 1093 |
| WP_024786433 | 1047 | LAD-DQIVERPMIE VNDET-GE-IAWDKTKHITTVKKVLS-YPQVNIVKKVEEQT GGLFD -----PKS- | 1111 |
| WP_049473442 | 1042 | -----------DVR T-DKN-GE-IIWKKDEHISNIKKVLS-YPQVNIVKKVEEQT GGFSK ESIL-PKG- | 1093 |
| WP_049474547 | 1042 | -----------DVR T-DKN-GE-IIWKKDEHISNIKKVLS-YPQVNIVKKVEEQT GGFSK ESIL-PKG- | 1093 |
| EMC03581 | 1035 | -----------DVR T-DKN-GE-IIWKKDEHISNIKKVLS-YPQVNIVKKVEEQT GGFSK ESIL-PKG- | 1086 |
| WP_000428612 | 1059 | YAD-GTIVKRENIE Y-SKDtGE-IAWNKEKDFATIKKVLS-LPQVNIVKKREVQT GGFSK ESIL-PKG- | 1121 |
| WP_000428613 | 1057 | YAD-GTIVKRENIE Y-SKDtGE-IAWNKEKDFATIKKVLS-YPQVNIVKKREVQT GGFSK ESIL-PKG- | 1119 |
| WP_049523028 | 1052 | YAD-GTIIQRGNVE Y-SKDtGE-IAWNKKRDFAIVRKVLS-YPQVNIVKKTEEQT GGFSK ESIL-PKG- | 1114 |
| WP_003107102 | 1021 | LAD-GTVITRPQIE TNTET-GE-IVWDKVKDIKTIRKVLS-IPQINVVKKTEVQT GGFSK ESIL-SKR- | 1083 |
| WP_054279288 | 1053 | LAN-GNIIKRSPIE VNEET-GE-IVWDKIKDFGTVRKVLS-APQVNIVKKTEIQT GGFSN ETIL-SKG- | 1115 |
| WP_049531101 | 1057 | YAD-GTIVKRENIE Y-SKDtGE-IAWNKEIDFATIRKILS-LSQVNIVKKTEEQT GGLFD NNIV-SKKk | 1124 |
| WP_049538452 | 1057 | YAD-GTIVKRENIE Y-SKDtGE-IAWNKEKDFATIKKILS-LPQVNIVKKTEEQT GGLFD NNIV-SKKk | 1124 |
| WP_049549711 | 1059 | YAD-GTIVKRENIE Y-SKDtGE-IAWNKEKDFATIKKVLS-YPQVNIVKKTEEQT GGLFD NNIV-SKEk | 1126 |
| WP_007896501 | 1058 | LAD-GTLMKRPVIE TNTET-GE-VVWDKVKDFKTIRKVLS-YPQVNIVKKTEIQS GAFSK ESVL-SKG- | 1120 |
| EFR44625 | 1010 | LAD-GTLMKRPVIE TNTET-GE-VVWDKVKDFKTIRKVLS-YPQVNIVKKTEIQS GAFSK ESVL-SKG- | 1072 |
| WP_002897477 | 1056 | YAD-GTIRKRENIE Y-SKDtGE-IAWDKEKDFATIKKVLS-YPQVNIVKKREVQT GGFSK ESIL-PKG- | 1118 |
| WP_002906454 | 1056 | YAD-GTIKKRENIE Y-SNDtGE-IAWNKEKDFATIKKVLS-LPQVNIVKKTEEQT GGLFD NNIV-SKKk | 1123 |
| WP_009729476 | 1057 | YAD-GTIVKRENIE Y-SKDtGE-IAWNKEKDFATIKKVLS-LPQVNIVKKREVQT GGFSK ESIL-PKG- | 1119 |
| CQR24647 | 1047 | LAD-GRVVEKPVIE ANEET-GE-IAWDKTKHFANVKKVLS-YPQVSIVKKVEEQT GGFSK ESIL-PKG- | 1109 |
| WP_000066813 | 1061 | YAD-GTIVKRENIE Y-SKDtGE-IAWNKEKDFATVKKVLS-LPQVNIVKKTEVQT GGFSK ESIL-PKG- | 1123 |
| WP_009754323 | 1057 | YAD-GTIVKRENIE Y-SKDtGE-IAWNKEKDFVTIKKVLS-YPQVNIVKKREVQT GGFSK ESIL-PKG- | 1119 |
| WP_044674937 | 1049 | YSKtGEVRIRPVIE VNKET-GE-IVWDKKSDFRTVRKVLS-YPQVNVVKKVEMQT GGFSK ESIL-QHG- | 1112 |
| WP_044676715 | 1051 | YSKtGEVRIRPVIE VNKET-GE-IVWDKKSDFRTVRKVLS-YPQVNVVKKVEMQT GGFSK ESIL-QHG- | 1114 |
| WP_044680361 | 1051 | YSKtGEVRIRPVIE VNKET-GE-IVWDKKSDFRTVRKVLS-YPQVNVVKKVEMQT GGFSK ESIL-QHG- | 1114 |
| WP_044681799 | 1049 | YSKtGEVRIRPVIE VNKET-GE-IVWDKKSDFKTVRKVLS-YPQVNVVKKVEMQT GGFSK ESIL-QHG- | 1112 |
| WP_049533112 | 1051 | FAD-GTVVERPDIE T-SED-GE-IAWNKQTDFKIVRKVLS-YPQVNIVKKTEVQT HGLDR PSPK-PKP- | 1122 |
| WP_029090905 | 1008 | -KQ----------Q --NSTtGE-VKWNPEVDIAKLKRILN-FKQCNIVRKVEEQS GALFK ETIY-PVEe | 1061 |
| WP_006506696 | 1039 | --D----------- ------GK-LIWNP-DLINEIKKCFY-YKDCYCTTKLDQKS GQLFN -TVL-SNDa | 1084 |
| AIT42264 | 1052 | LAN-GEIRKRPLIE TNGET-GE-IVWDKGRDFATVRKVLS-MPQVNIVKKTEVQT GGFSK ESIL-PKR- | 1114 |
| WP_034440723 | 1042 | ------------LA --NPD-GE-IAWEKDKDLNTIRKVLS-SKQINIIKKAEEGK GRLFK ETIN-SRPs | 1092 |
| AKQ21048 | 1052 | LAN-GEIRKRPLIE TNGET-GE-IVWDKGRDFATVRKVLS-MPQVNIVKKTEVQT GGFSK ESIL-PKR- | 1114 |
| WP_004636532 | 1043 | -------------- VNEET-GE-ILWDTERHLSTIKRVLS-WKQMNIVKKVEKQK GQLWK ETIY-PKG- | 1092 |
| WP_002364836 | 1048 | --E----------P RFTKD-GE-ILWSN-SYLKTIKKELN-YHQMNIVKKVEVQK GGFSK ESIK-PKG- | 1098 |
| WP_016631044 | 999 | --E----------P RFTKD-GE-ILWSN-SYLKTIKKELN-YHQMNIVKKVEVQK GGFSK ESIK-PKG- | 1049 |
| EMS75795 | 783 | --E----------Y SYDEN-GE-IFWDKARHIPQIKKVIS-SHQVNIVKKVEVQT GGFYK ETVN-PKG- | 834 |
| WP_002373311 | 1048 | --E----------P RFTKD-SE-ILWSN-SYLKTIKKELN-YHQMNIVKKVEVQK GGFSK ESIK-PKG- | 1098 |
| WP_002378009 | 1048 | --E----------P RFTKD-GE-ILWSN-SYLKTIKKELN-YHQMNIVKKVEVQK GGFSK ESIK-PKG- | 1098 |
| WP_002407324 | 1048 | --E----------P RFTKD-GE-ILWSN-SYLKTIKKELN-YHQMNIVKKVEVQK GGFSK ESIK-PKG- | 1098 |
| WP_002413717 | 1048 | --E----------P RFTKD-GE-ILWSN-SYLKTIKKELN-YHQMNIVKKVEVQK GGFSK ESIK-PKG- | 1098 |
| WP_010775580 | 1050 | --E----------P RFTKD-GE-ILWSN-SYLKTIKKELN-YHQMNIVKKVEVQK GGFSK ESIK-PKG- | 1100 |
| WP_010818269 | 1048 | --E----------P RFTKD-GE-ILWSN-SYLKTIKKELN-YHQMNIVKKVEVQK GGFSK ESIK-PKG- | 1098 |
| WP_010824395 | 1048 | --E----------P RFTKD-GE-ILWSN-SYLKTIKKELN-YHQMNIVKKVEVQK GGFSK ESIK-PKG- | 1098 |
| WP_016622645 | 1048 | --E----------P RFTKD-GE-ILWSN-SYLKTIKKELN-YHQMNIVKKVEVQK GGFSK ESIK-PKG- | 1098 |
| WP_033624816 | 1048 | --E----------P RFTKD-GE-ILWSN-SYLKTIKKELN-YHQMNIVKKVEVQK GGFSK ESIK-PKG- | 1098 |
| WP_033625576 | 1048 | --E----------P RFTKD-GE-ILWSN-SYLKTIKKELN-YHQMNIVKKVEVQK GGFSK ESIK-PKG- | 1098 |
| WP_033789179 | 1048 | --E----------P RFTKD-GE-ILWSN-SYLKTIKKELN-YHQMNIVKKVEVQK GGFSK ESIK-PKG- | 1098 |
| WP_002310644 | 1049 | --T----------P VCDEN-GE-IFWDKSKSIAQVKKVIN-HHHMNIVKKTEIQK GGFSK ETVE-PKK- | 1100 |
| WP_002312694 | 1050 | --T----------P VCDEN-GE-IFWDKSKSIAQVKKVIN-HHHMNIVKKTEIQK GGFSK ETVE-PKK- | 1101 |
| WP_002314015 | 1050 | --T----------P VCDEN-GE-IFWDKSKSIAQVKKVIN-HHHMNIVKKTEIQK GGFSK ETVE-PKK- | 1101 |
| WP_002320716 | 1050 | --T----------P VCDEN-GE-IFWDKSKSIAQVKKVIN-HHHMNIVKKTEIQK GGFSK ETVE-PKK- | 1101 |
| WP_002330729 | 1049 | --T----------P VCDEN-GE-IFWDKSKSIAQVKKVIN-HHHMNIVKKTEIQK GGFSE ETVE-PKK- | 1100 |
| WP_002335161 | 1050 | --T----------P VCDEN-GE-IFWDKSKSIAQVKKVIN-HHHMNIVKKTEIQK GGFSK ETVE-PKK- | 1101 |
| WP_002345439 | 1050 | --T----------P VCDEN-GE-IFWDKSKSIAQVKKVIN-HHHMNIVKKTEIQK GGFSK ETVE-PKK- | 1101 |
| WP_034867970 | 1040 | --E----------P FCDEN-GE-IYWEKSHHLPRIKKVLS-SHQVNVVKKVEQQK GGFYK ETVN-SKE- | 1091 |
| WP_047937432 | 1050 | --T----------P VCDEN-GE-IFWDKSKSIAQVKKVIN-HHHMNIVKKTEIQK GGFSK ETVE-PKK- | 1101 |
| WP_010720994 | 1040 | --E----------P FCDEN-GE-IYWEKSHHLPRIKKVLS-SHQVNVVKKVEQQK GGFYK ETVN-SKE- | 1091 |
| WP_010737004 | 1040 | --E----------P FCDEN-GE-IYWEKSHHLPRIKKVLS-SHQVNVVKKVEQQK GGFYK ETVN-SKE- | 1091 |
| WP_034700478 | 1040 | --E----------P FCDEN-GE-IYWEKSHHLPRIKKVLS-SHQVNVVKKVEQQK GGFYK ETVN-SKE- | 1091 |
| WP_007209003 | 1038 | --D----------- IINDD-GE-ILWNKQETIAQVIKTLG-MHQVNVVKKVEIQK GGFSK ESIQ-PKG- | 1089 |
| WP_023519017 | 1034 | --E----------I ICDEQ-GE-VIWNKKRDLSTIKKTIG-AHQVNIVKKVEKQK GGFYK ETIN-SKA- | 1085 |
| WP_010770040 | 1046 | --A----------V IIDEN-GE-ILWDK-KNIATVKKVMS-YPQMNIVKKPEIQT GSFSK ETIK-PKG- | 1096 |
| WP_048604708 | 1043 | --K----------V IIDEN-GE-ILWNQ-KKIVTVKKVMN-YRQMNIVKKVEIQK GGFSK ESIL-PKG- | 1093 |
| WP_010750235 | 1043 | --E----------Q FCDEN-GE-IFWDKRKHIQQIKKVIS-SHQVNIVKKVEVQT GSFYK ETVN-TKE- | 1094 |
| A1116583 | 1091 | LAN-GEIRKRPLIE TNGET-GE-IVWDKGRDFATVRKVLS-MPQVNIVKKTEVQT GGFSK ESIL-PKR- | 1153 |
| WP_029073316 | 1053 | --D----------- ----T-GE-VVWDP-EWISRIKKCFY-YKDCFVTKKLEENN GSFFN -TVR-PNDe | 1099 |
| WP_031589969 | 1053 | --D----------- ----T-GE-IVWDP-NYIDRIKKCFY-YKDCFVTKKLEENN GTFFN -TVL-PNDt | 1099 |
| KDA45870 | 1035 | YPF----------- -----------WDKARDLPTIKRYLY-RAQVNKVRKAERQT GGFSD EMLV-PKS- | 1078 |
| WP_039099354 | 1044 | -------------E LVDEN-TEaVIWNKESGLAYLNKIYQ-FKKILVTREVHENS GALFN QTLYaAKDd | 1097 |
| AKP02966 | 1063 | --N-------GTTQ --DRNtGE-IIWNVG-FRDKILKIFN-YHQCNVTRKTEIKT GQFYD QTIYsPKNp | 1118 |
| WP_010991369 | 1045 | --D----------R IIDEN-GE-ILWDK-KYLDTVKKVMS-YRQMNIVKKTEIQK GEFSK ATIK-PKG- | 1095 |
| WP_033838504 | 1045 | --D----------R IIDEN-GE-ILWDK-KYLDTVKKVMS-YRQMNIVKKTEIQK GEFSK ATIK-PKG- | 1095 |
| EHN60060 | 1048 | --D----------R IIDEN-GE-ILWDK-KYLDTVKKVMS-YRQMNIVKKTEIQK GEFSK ATIK-PKG- | 1098 |
| EFR89594 | 814 | --D----------R IIDEN-GE-ILWDK-KYLDTVKKVMS-YRQMNIVKKTEIQK GEFSK ATIK-PKG- | 864 |
| WP_038409211 | 1045 | --N----------Q IIDKN-GE-ILWDN-RYLDTIKKVLS-YRQMNIVKKTEIQK GEFSN ATVN-PKG- | 1095 |
| EFR95520 | 664 | --N----------Q IIDKN-GE-ILWDN-RYLDTIKKVLS-YRQMNIVKKTEIQK GEFSN ATVN-PKG- | 714 |
| WP_003723650 | 1045 | --E----------R IIDEN-GE-ILWDK-KYLETIKKVLD-YRQMNIVKKTEIQK GEFSK ATIK-PKG- | 1095 |
| WP_003727705 | 1045 | --E----------R IIDEN-GE-ILWDK-KYLETIKKVLD-YRQINIVKKTEIQK GEFSK ATIK-PKG- | 1095 |
| WP_003730785 | 1045 | --E----------R IIDEN-GE-ILWDK-KYLETIKKVLD-YRQINIVKKTEIQK GEFSK ATIK-PKG- | 1095 |
| WP_003733029 | 1045 | --D----------R IIDEN-GE-ILWDK-RYLETVKKVLG-YRQMNIVKKTEIQK GEFSN VTPN-PKG- | 1095 |
| WP_003739838 | 1045 | --E----------R IIDEN-GE-ILWDK-KYLETIKKVLD-YRQMNIVKKTEIQK GEFSK ATIK-PKG- | 1095 |
| WP_014601172 | 1045 | --E----------R IIDEN-GE-ILWDK-KYLETIKKVLD-YRQMNIVKKTEIQK GEFSK ATIK-PKG- | 1095 |
| WP_023548323 | 1045 | --E----------R IIDEN-GE-ILWDK-KYLETIKKVLN-YRQMNIVKKTEIQK GEFSN QNPK-PRG- | 1095 |
| WP_031665337 | 1045 | --E----------R IIDEN-GE-ILWDK-KYLETIKKVLD-YRQMNIVKKTEIQK GEFSK ATIK-PKG- | 1095 |
| WP_031669209 | 1045 | --D----------R IIDEN-GE-ILWDK-RYLETVKKVLG-YRQMNIVKKTEIQK GEFSN VTPN-PKG- | 1095 |
| WP_033920898 | 1045 | --E----------R IIDEN-GE-ILWDK-KYLETIKKVLN-YRQMNIVKKTEIQK GEFSN QNPK-PRG- | 1095 |
| AKI42028 | 1048 | --E----------R IIDEN-GE-ILWDK-KYLETIKKVLD-YRQMNIVKKTEIQK GEFSK ATIK-PKG- | 1098 |
| AKI 50529 | 1048 | --E----------R IIDEN-GE-ILWDK-KYLETIKKVLN-YRQMNIVKKTEIQK GEFSN QNPK-PRG- | 1098 |
| EFR83390 | 493 | --E----------R IIDEN-GE-ILWDK-KYLETIKKVLD-YRQMNIVKKTEIQK GEFSK ATIK-PKG- | 543 |
| WP_046323366 | 1045 | --D----------R IIDEN-GE-ILWDK-KYLDTIKKVLN-YRQMNIVKKTEIQK GEFSN ATAN-PKG- | 1095 |
| AKE81011 | 1068 | LAN-GEIRKRPLIE TNGET-GE-IVWDKGRDFATVRKVLS-MPQVNIVKKTEVQT GGFSK ESIL-PKR- | 1130 |
| CUO82355 | 1043 | --D----------- ------GK-LIWNP-DLINEIKKCFY-YKDCYCITKLDQKS GQMFN -TVL-PNDa | 1088 |
| WP_033162887 | 1043 | --D----------- ----T-GE-VMWDP-AKIGKIKSCFY-YKDVYVTKKLEQNS GTLFN -TVL-PNDa | 1089 |
| AGZ 01981 | 1085 | LAN-GEIRKRPLIE TNGET-GE-IVWDKGRDFATVRKVLS-MPQVNIVKKTEVQT GGFSK ESIL-PKR- | 1147 |
| AKA60242 | 1052 | LAN-GEIRKRPLIE TNGET-GE-IVWDKGRDFATVRKVLS-MPQVNIVKKTEVQT GGFSK ESIL-PKR- | 1114 |
| AKS40380 | 1052 | LAN-GEIRKRPLIE TNGET-GE-IVWDKGRDFATVRKVLS-MPQVNIVKKTEVQT GGFSK ESIL-PKR- | 1114 |
| 4UN5_B | 1056 | LAN-GEIRKRPLIE TNGET-GE-IVWDKGRDFATVRKVLS-MPQVNIVKKTEVQT GGFSK ESIL-PKR- | 1118 |
| WP_010922251 | 1115 | --NSD KLIA----RKKDW-DPKKYGGFDSPIVAYSV-LVVAK--VE--KGKSKKLKSVKELLGITIME RSSFEK | 1176 |
| WP_039695303 | 1121 | --DSD KLIPRKIkKV-YW-DIKKYGGEDSPIVAYSV-FVVAD--VE--KGKAKKLKTVKELVGISIME RSFFEE | 1185 |
| WP_045635197 | 1119 | --NSD KLIPRKT-KDILL-DTTKYGGEDSPVIAYSI-LLIAD--IE--KGKAKKLKTVKILVGITIME KAAFEE | 1183 |
| 5AXW_A | 853 | --EKN -LYKYYEeTGNYL---TKYSKKDNGPVIKKI------------KYYGNKLNAHLDITDDYPNS -VKLSL | 912 |
| WP_009880683 | 799 | --NSD KLIA----RKKDW-DPKKYGGFDSPIVAYSV-LVVAK--VE--KGKSKKLKSVKELVGITIME RSSFEK | 860 |
| WP_010922251 | 1115 | --NSD KLIA----RKKDW-DPKKYGGFDSPIVAYSV-LVVAK--VE--KGKSKKLKSVKELLGITIME RSSFEK | 1176 |
| WP_011054416 | 1115 | --NSD KLIA----RKKDW-DPKKYGGFDSPIVAYSV-LVVAK--VE--KGKSKKLKSVKELLGITIME RSSFEK | 1176 |
| WP_011284745 | 1115 | --NSD KLIA----RKKDW-DPKKYGGFDSPIVAYSV-LVVAK--VE--KGKSKKLKSVKELLGITIME RSSFEK | 1176 |
| WP_011285506 | 1115 | --NSD KLIA----RKKDW-DPKKYGGFDSPIVAYSV-LVVAK--VE--KGKSKKLKSVKELLGITIME RSSFEK | 1176 |
| WP_011527619 | 1115 | --NSD KLIA----RKKDW-DPKKYGGFDSPIVAYSV-LVVAK--VE--KGKSKKLKSVKELLGITIME RSSFEK | 1176 |
| WP_012560673 | 1115 | --NSD KLIA----RKKDW-DPKKYGGFDSPIVAYSV-LVVAK--VE--KGKSKKLKSVKELVGITIME RSSFEK | 1176 |
| WP_014407541 | 1114 | --NSD KLIA----RKKDW-DPKKYGGFDSPIVAYSV-LVVAK--VE--KGKSKKLKSVKELLGITIME RSSFEK | 1175 |
| WP_020905136 | 1115 | --NSD KLIA----RKKDW-DPKKYGGFDSPIVAYSV-LVVAK--VE--KGKSKKLKSVKELLGLTIME RSSFEK | 1176 |
| WP_023080005 | 1114 | --NSD KLIA----RKKDW-DPKKYGGFDSPIVAYSV-LVVAK--VE--KGKSKKLKSVKELLGITIME RSSFEK | 1175 |
| WP_023610282 | 1114 | --NSD KLIA----RKKDW-DPKKYGGFDSPIVAYSV-LVVAK--VE--KGKSKKLKSVKELLGITIME RSSFEK | 1175 |
| WP_030125963 | 1115 | --NSD KLIA----RKKDW-DPKKYGGFDSPIVAYSV-LVVAK--VE--KGKSKKLKSVKELLGITIME RSSFEK | 1176 |
| WP_030126706 | 1115 | --NSD KLIA----RKKDW-DPKKYGGFDSPIVAYSV-LVVAK--VE--KGKSKKLKSVKELLGITIME RSSFEK | 1176 |
| WP_031488318 | 1115 | --NSD KLIA----RKKDW-DPKKYGGFDSPIVAYSV-LVVAK--VE--KGKSKKLKSVKELLGITIME RSSFEK | 1176 |
| WP_032460140 | 1115 | --NSD KLIA----RKKDW-DPKKYGGFDSPIVAYSV-LVVAK--VE--KGKSKKLKSVKELVGITIME RSSFEK | 1176 |
| WP_032461047 | 1115 | --NSD KLIA----RKKDW-DPKKYGGFDSPIVAYSV-LVVAK--VE--KGKSKKLKSVKELVGITIME RSSFEK | 1176 |
| WP_032462016 | 1115 | --NSD KLIA----RKKDW-DPKKYGGFDSPIVAYSV-LVVAK--VE--KGKSKKLKSVKELLGITIME RSSFEK | 1176 |
| WP_032462936 | 1115 | --NSD KLIA----RKKDW-DPKKYGGFDSPIVAYSV-LVVAK--VE--KGKSKKLKSVKELLGITIME RSSFEK | 1176 |
| WP_032464890 | 1115 | --NSD KLIA----RKKDW-DPKKYGGFDSPIVAYSV-LVVAK--VE--KGKSKKLKSVKELLGITIME RSSFEK | 1176 |
| WP_033888930 | 940 | --NSD KLIA----RKKDW-DPKKYGGFDSPIVAYSV-LVVAK--VE--KGKSKKLKSVKELLGITIME RSSFEK | 1001 |
| WP_038431314 | 1115 | --NSD KLIA----RKKDW-DPKKYGGFDSPIVAYSV-LVVAK--VE--KGKSKKLKSVKELLGITIME RSSFEK | 1176 |
| WP_038432938 | 1114 | --NSD KLIA----RKKDW-DPKKYGGFDSPIVAYSV-LVVAK--VE--KGKSKKLKSVKELLGITIME RSSFEK | 1175 |
| WP_038434062 | 1115 | --NSD KLIA----RKKDW-DPKKYGGFDSPIVAYSV-LVVAK--VE--KGKSKKLKSVKELLGITIME RSSFEK | 1176 |
| BAQ51233 | 1026 | --NSD KLIA----RKKDW-DPKKYGGFDSPIVAYSV-LVVAK--VE--KGKSKKLKSVKELLGITIME RSSFEK | 1087 |
| KGE60162 | 290 | --NSD KLIA----RKKDW-DPKKYGGFDSPIVAYSV-LVVAK--VE--KGKSKKLKSVKELLGITIME RSSFEK | 351 |
| KGE60856 | 53 | --NSD KLIA----RKKDW-DPKKYGGFDSPIVAYSV-LVVAK--VE--KGKSKKLKSVKELLGITIME RSSFEK | 114 |
| WP_002989955 | 1115 | --NSD KLIA----RKKDW-DPKKYGGFDSPIVAYSV-LVVAK--VE--KGKSKKLKSVKELLGITIME RSSFEK | 1176 |
| WP_003030002 | 1094 | --ESD KLIPRKT-KNSYW-NPKKYGGEDSPVVAYSI-LVFAD--VE--KGKSKKLRKVQDMVGITIME KKRFEK | 1158 |
| WP_003065552 | 1122 | --DSD KLIPRKTkKA-YW-DIKKYGGEDSPIVAYSV-FVVAD--VE--KGKAKKLKTVKELVGISIME RSFFEE | 1186 |
| WP_001040076 | 1113 | --NSD KLIPRKT-KDIYL-DPKKYGGEDSPIVAYSV-LVVAD--IK--KGKAQKLKTVTELLGITIME RSRFEK | 1177 |
| WP_001040078 | 1121 | --NSD KLIPRKT-KDIYL-DPKKYGGEDSPIVAYSV-LVVAD--IK--KGKAQKLKTVTELLGITIME RSKFEK | 1185 |
| WP_001040080 | 1113 | --NSD KLIPRKT-KDIYL-DPKKYGGEDSPIVAYSV-LVVAD--IK--KGKAQKLKTVTELLGITIME RSRFEK | 1177 |
| WP_001040081 | 1113 | --NSD KLIPRKT-KDIYL-DPKKYGGEDSPIVAYSV-LVVAD--IK--KGKAQKLKTVTELLGITIME RSRFEK | 1177 |
| WP_001040083 | 1113 | --NSD KLIPRKT-KDIYL-DPKKYGGEDSPIVAYSV-LVVAD--IK--KGKAQKLKTVTELLGITIME RSRFEK | 1177 |
| WP_001040085 | 1113 | --NSD KLIPRKT-KDIYL-DPKKYGGEDSPIVAYSV-LVVAD--IK--KGKAQKLKTVTELLGITIME RSRFEK | 1177 |
| WP_001040087 | 1113 | --NSD KLIPRKT-KDIYL-DPKKYGGFDSPIVAYSV-LVVAD--IK--KGKAQKLKTVTELLGITIME RSRFEK | 1177 |
| WP_001040088 | 1113 | --NSD KLIPRKT-KDIYL-DPKKYGGFDSPIVAYSV-LVVAD--IK--KGKAQKLKTVTELLGITIME RSRFEK | 1177 |
| WP_001040089 | 1113 | --NSD KLIPRKT-KDIYL-DPKKYGGFDSPIVAYSV-LVVAD--IK--KGKAQKLKTVTELLGITIME RSRFEK | 1177 |
| WP_001040090 | 1113 | --NSD KLIPRKT-KDIYL-DPKKYGGFDSPIVAYSV-LVVAD--IK--KGKAQKLKTVTELLGITIME RSRFEK | 1177 |
| WP_001040091 | 1113 | --NSD KLIPRKT-KDIYL-DPKKYGGFDSPIVAYSV-LVVAD--IK--KGKAQKLKTVTELLGITIME RSRFEK | 1177 |
| WP_001040092 | 1113 | --NSD KLIPRKT-KDIYL-DPKKYGGFDSPIVAYSV-LVLAD--IK--KGKAQKLKTVKELIGITIME RERFEK | 1177 |
| WP_001040094 | 1113 | --NSD KLIPRKT-KDIYL-DPKKYGGFDSPIVAYSV-LVVAD--IK--KGKAQKLKTVTELLGITIME RSRFEK | 1177 |
| WP_001040095 | 1113 | --NSD KLIPRKT-KDIYL-DPKKYGGFDSPIVAYSV-LVVAD--IK--KGKAQKLKTVTELLGITIME RSRFEK | 1177 |
| WP_001040096 | 1113 | --NSD KLIPRKT-KDIYL-DPKKYGGFDSPIVAYSV-LVVAD--IK--KGKAQKLKTVTELLGITIME RSRFEK | 1177 |
| WP_001040097 | 1113 | --NSD KLIPRKT-KDIYL-DPKKYGGFDSPIVAYSV-LVVAD--IK--KGKAQKLKTVTELLGITIME RSRFEK | 1177 |
| WP_001040098 | 1113 | --NSD KLIPRKT-KDIYL-DPKKYGGFDSPIVAYSV-LVVAD--IK--KGKAQKLKTVTELLGITIME RSRFEK | 1177 |
| WP_001040099 | 1113 | --NSD KLIPRKT-KDIYL-DPKKYGGFDSPKVAYSV-LVVAD--IK--KGKAQKLKTVTELLGITIME RSRFEK | 1177 |
| WP_001040100 | 1113 | --NSD KLIPRKT-KDIYL-DPKKYGGFDSPIVAYSV-LVVAD--IK--KGKAQKLKTVTELLGITIME RSRFEK | 1177 |
| WP_001040104 | 1113 | --NSD KLIPRKT-KDIYL-DPKKYGGFDSPIVAYSV-LVVAD--IK--KGKAQKLKTVTELLGITIME RSRFEK | 1177 |
| WP_001040105 | 1113 | --NSD KLIPRKT-KDIYL-DPKKYGGFDSPIVAYSV-LVVAD--IK--KGKAQKLKTVTELLGITIME RSRFEK | 1177 |
| WP_001040106 | 1113 | --NSD KLIPRKT-KDIYL-DPKKYGGFDSPIVAYSV-LVVAD--IK--KGKAQKLKTVTELLGITIME RFRFEK | 1177 |
| WP_001040107 | 1113 | --NSD KLIPRKT-KDIYL-DPKKYGGFDSPIVAYSV-LVVAD--IK--KGKAQKLKTVTELLGITIME RFRFEK | 1177 |
| WP_001040108 | 1113 | --NSD KLIPRKT-KDIYL-DPKKYGGFDSPIVAYSV-LVVAD--IK--KGKAQKLKTVTELLGITIME RFRFEK | 1177 |
| WP_001040109 | 1113 | --NSD KLIPRKT-KDIYL-DPKKYGGFDSPIVAYSV-LVVAD--IK--KGKAQKLKTVTELLGITIME RFRFEK | 1177 |
| WP_001040110 | 1113 | --NSD KLIPRKT-KDIYL-DPKKYGGFDSPIVAYSV-LVVAD--IK--KGKAQKLKTVTELLGITIME RFRFEK | 1177 |
| WP_015058523 | 1113 | --NSD KLIPRKT-KDIYL-DPKKYGGFDSPIVAYSV-LVLAD--IK--KGKAQKLKTVKELIGITIME RERFEK | 1177 |
| WP_017643650 | 1113 | --NSD KLIPRKT-KDIYL-DPKKYGGFDSPIVAYSV-LVVAD--IK--KGKAQKLKTVTELLGITIME RSRFEK | 1177 |
| WP_017647151 | 1113 | --NSD KLIPRKT-KDIYL-DPKKYGGFDSPIVAYSV-LVVAD--IK--KGKAQKLKTVTELLGITIME RSRFEK | 1177 |
| WP_017648376 | 1113 | --NSD KLIPRKT-KDIYL-DPKKYGGFDSPIVAYSV-LVVAD--IK--KGKAQKLKTVTELLGITIME RSRFEK | 1177 |
| WP_017649527 | 1113 | --NSD KLIPRKT-KDIYL-DPKKYGGFDSPIVAYSV-LVVAD--IK--KGKAQKLKTVTELLGITIME RSRFEK | 1177 |
| WP_017771611 | 1113 | --NSD KLIPRKT-KDIYL-DPKKYGGFDSPIVAYSV-LVVAD--IK--KGKAQKLKTVTELLGITIME RFRFEK | 1177 |
| WP_017771984 | 1113 | --NSD KLIPRKT-KDIYL-DPKKYGGFDSPIVAYSV-LVAAD--IK--KGKAQKLKTVTELLGITIME RSRFEK | 1177 |
| CFQ25032 | 1113 | --NSD KLIPRKT-KDIYL-DPKKYGGFDSPIVAYSV-LVVAD--IK--KGKAQKLKTVTELLGITIME RSRFEK | 1177 |
| CFV16040 | 1113 | --NSD KLIPRKT-KDIYL-DPKKYGGFDSPIVAYSV-LVVAD--IK--KGKAQKLKTVTELLGITIME RSRFEK | 1177 |
| KLJ37842 | 1113 | --NSD KLIPRKT-KDIYL-DPKKYGGFDSPIVAYSV-LVVAD--IK--KGKAQKLKTVTELLGITIME RSRFEK | 1177 |
| KLJ72361 | 1113 | --NSD KLIPRKT-KDIYL-DPKKYGGFDSPIVAYSV-LVVAD--IK--KGKAQKLKTVTELLGITIME RSRFEK | 1177 |
| KLL20707 | 1127 | --NSD KLIPRKT-KDIYL-DPKKYGGFDSPIVAYSV-LVVAD--IK--KGKAQKLKTVTELLGITIME RSRFEK | 1191 |
| KLL42645 | 1113 | --NSD KLIPRKT-KDIYL-DPKKYGGFDSPIVAYSV-LVVAD--IK--KGKAQKLKTVTELLGITIME RFRFEK | 1177 |
| WP_047207273 | 1113 | --NSD KLIPRKT-KDIYL-DPKKYGGFDSPIVAYSV-LVVAD--IK--KGKAQKLKTVTELLGITIME RSRFEK | 1177 |
| WP_047209694 | 1113 | --NSD KLIPRKT-KDIYL-DPKKYGGFDSPIVAYSV-LVVAD--IK--KGKAQKLKTVTELLGITIME RSRFEK | 1177 |
| WP_050198062 | 1113 | --NSD KLIPRKT-KDIYL-DPKKYGGFDSPIVAYSV-LVVAD--IK--KGKAQKLKTVTELLGITIME RSRFEK | 1177 |
| WP_050201642 | 1113 | --NSD KLIPRKT-KDIYL-DPKKYGGFDSPIVAYSV-LVVAD--IK--KGKAQKLKTVTELLGITIME RSRFEK | 1177 |
| WP_050204027 | 1113 | --NSD KLIPRKT-KDIYL-DPKKYGGFDSPIVAYSV-LVVAD--IK--KGKAQKLKTVTELLGITIME RFRFEK | 1177 |
| WP_050881965 | 1113 | --NSD KLIPRKT-KDIYL-DPKKYGGFDSPIVAYSV-LVVAD--IK--KGKAQKLKTVTELLGITIME RSRFEK | 1177 |
| WP_050886065 | 1113 | --NSD KLIPRKT-KDIYL-DPKKYGGFDSPIVAYSV-LVVAD--IK--KGKAQKLKTVTELLGITIME RSRFEK | 1177 |
| AHN30376 | 1113 | --NSD KLIPRKT-KDIYL-DPKKYGGFDSPIVAYSV-LVLAD--IK--KGKAQKLKTVKELIGITIME RERFEK | 1177 |
| EAO78426 | 1113 | --NSD KLIPRKT-KDIYL-DPKKYGGFDSPIVAYSV-LVVAD--IK--KGKAQKLKTVTELLGITIME RSRFEK | 1177 |
| CCW42055 | 1113 | --NSD KLIPRKT-KDIYL-DPKKYGGFDSPIVAYSV-LVVAD--IK--KGKAQKLKTVTELLGITIME RSRFEK | 1177 |
| WP_003041502 | 1123 | --DSS ENLVGVK-RNL---DPKKYGGYAGISNSYAV-LVKAI--IE--KGVKKKETMVLEFQGISILD RITFEK | 1185 |
| WP_037593752 | 1095 | --ESD KLIPRKT-KNSYW-NPKKYGGFDSPVVAYSI-LVFAD--VE--KGKSKKLRKVQDMVGITIME KKRFEK | 1159 |
| WP_049516684 | 1095 | --ESD KLIPRKT-KNSYW-NPKKYGGFDSPVVAYSI-LVFAD--VE--KGKSKKLRKVQDMVGITIME KKRFEK | 1159 |
| GAD46167 | 1094 | --ESD KLIPRKT-KNSYW-NPKKYGGFDSPVVAYSI-LVFAD--VE--KGKSKKLRKVQDMVGITIME KKRFEK | 1158 |
| WP_018363470 | 1126 | --DSD KLIPRKTkKV-LW-EPKKYGGFDSPTVAYSV-LVVAD--VE--KGKIKKLKTVKELVGISIME RSFFEK | 1190 |
| WP_003043819 | 1124 | --ESA KLIP----RKKGW-DIRKYGGFGSPTVAYSI-LVVAK--VE--KGKAKKLKSVKVLVGITIME KGSYEK | 1185 |
| WP_006269658 | 1094 | --ESD KLIPRKT-KNSYW-DPKKYGGFDSPVVAYSI-LVFAD--VE--KGKSKKLRKVQDMVGITIME KKRFEK | 1158 |
| WP_048800889 | 1114 | --DSD KLIARKTkEN-YW-DIKKYGGFDSPTVAYSV-LVVAD--IK--KGKAKKLKTVKELVGISIME RPFFEK | 1178 |
| WP_012767106 | 1114 | --SFD KLIS----RKHRF-ESSKYGGFGSPTVTYSV-LVVAKskVQ--DGKVKKIKTGKELIGMTLLD KLVFEK | 1177 |
| WP_014612333 | 1114 | --SFD KLIS----RKHRF-ESSKYGGFGSPTVTYSV-LVVAKskVQ--DGKVKKIKTGKELIGITLLD KLVFEK | 1177 |
| WP_015017095 | 1114 | --SFD KLIS----RKHRF-ESSKYGGFGSPTVTYSV-LVVAKskVQ--DGKVKKIKTGKELIGITLLD KLVFEK | 1177 |
| WP_015057649 | 1114 | --SFD KLIS----RKHRF-ESSKYGGFGSPTVTYSV-LVVAKskVQ--DGKVKKIKTGKELIGITLLD KLVFEK | 1177 |
| WP_048327215 | 1114 | --SFD KLIS----RKHRF-ESSKYGGFGSPTVTYSV-LVVAKckVQ--DGKVKKIKTGKELIGITLLD KLVFEK | 1177 |
| WP_049519324 | 1114 | --SFD KLIS----RKHRF-ESSKYGGFGSPTVTYSV-LVVAKskVQ--DGKVKKIKTGKELIGITLLD KLVFEK | 1177 |
| WP_012515931 | 1095 | --NSD KLIP----RKNNW-DTRKYGGFDSPTVAYSV-LVIAK--ME--KGKAKVLKPVKEMVGITIME RTAFEE | 1156 |
| WP_021320964 | 1095 | --NSD KLIP----RKNNW-DIRKYGGFDSPTVAYSV-LVIAK--ME--KGKAKVLKPVKEMVGITIME RIAFEE | 1156 |
| WP_037581760 | 1095 | --NSD KLIP----RKNNW-DIRKYGGFDSPTVAYSV-LVIAK--ME--KGKAKVLKPVKEMVGITIME RIAFEE | 1156 |
| WP_004232481 | 1124 | --DSD KLIPRKTkKL-QW-ETQKYGGFDSPTVAYSV-LVVAD--VE--KGKIRKLKTVKELVGISIME RSSFEE | 1188 |
| WP_009854540 | 1119 | --DSD KLIPRKIkKV-YW-DIKKYGGFDSPTVAYSV-FVVAD--VE--KGKAKKLKTVKELVGISIME RSFFEE | 1183 |
| WP_012962174 | 1120 | --NSD KLIPRKTkKF-RW-DTPKYGGFDSPNIAYSV-FVIAD--VE--KGKAKKLKTVKELVGISIME RSSFEE | 1184 |
| WP_039695303 | 1121 | --DSD KLIPRKIkKV-YW-DIKKYGGFDSPTVAYSV-FVVAD--VE--KGKAKKLKTVKELVGISIME RSFFEE | 1185 |
| WP_014334983 | 1124 | --DSD KLIPRKIkKV-YW-NIKKYGGFDSPTVAYSV-LVVAD--IE--KGKAKKLKTVKELVGISIME RSFFEE | 1188 |
| WP_003099269 | 1115 | --DSD KLIA----RKKSW-DPKKYGGFDSPIIAYSV-LVVAK--IA--KGKTQKLKTIKELVGIKIME QDEFEK | 1176 |
| AHY15608 | 1115 | --DSD KLIA----RKKSW-DPKKYGGFDSPIIAYSV-LVVAK--IA--KGKTQKLKTIKELVGIKIME QDEFEK | 1176 |
| AHY17476 | 1115 | --DSD KLIA----RKKSW-DPKKYGGFDSPIIAYSV-LVVAK--IA--KGKTQKLKTIKELVGIKIME QDEFEK | 1176 |
| ESR09100 | 1 | ----- -------------------------------------------------------------ME QDEFEK | 8 |
| AGM98575 | 1115 | --DSD KLIA----RKKSW-DPKKYGGFDSPIIAYSV-LVVAK--IA--KGKTQKLKTIKELVGIKIME QDEFEK | 1176 |
| AL F27331 | 1094 | --NSD KLIPRKT-KKFYW-DTKKYGGFDSPIVAYSI-LVIAN--IE--KGKSKKLKLVKDLVGITIME RTIFEK | 1158 |
| WP_018372492 | 1109 | ---NN KLIP----RKKDW-SVDKYGGFIEPAESYSLaIFYID--IN-----GKKPKKKSTIIAISRME KKDYEK | 1167 |
| WP_045618028 | 1125 | vvDAS KLTPIKS-G---L-SPEKYGGYARPTIAYSV-LVIAD--IE--KGKAKKLKRIKEMVGITVQD KKKFEA | 1188 |
| WP_045635197 | 1119 | --NSD KLIPRKT-KDILL-DTTKYGGFDSPVIAYSI-LLIAD--IE--KGKAKKLKTVKILVGITIME KAAFEE | 1183 |
| WP_002263549 | 1094 | --NSD KLIPRKT-KKFYW-DIKKYGGFDSPIVAYSI-LVIAD--IE--KGKSKKLKTVKALVGVTIME KMTFER | 1158 |
| WP_002263887 | 1094 | --NSD KLIPRKT-KKFYW-DIKKYGGFDSPIVAYSI-LVIAD--IE--KGKSKKLKTVKALVGVTIME KMTFER | 1158 |
| WP_002264920 | 1094 | --DSD KLIPRKT-KKFYW-DIKKYGGFDSPIVAYSI-LVIAD--IE--KGKSKKLKTVKALVGVTIME KMTFER | 1158 |
| WP_002269043 | 1094 | --NSD KLIPRKT-KKFYW-DIKKYGGFDSPIVAYSI-LVIAD--IE--KGKSKKLKTVKALVGVTIME KMTFER | 1158 |
| WP_002269448 | 1094 | --NSD KLIPRKT-KKFYW-DTKKYGGEDSPIVAYSI-LVIAD--IE--KGKSKKLKTVKALVGVTIME KMTFER | 1158 |
| WP_002271977 | 1094 | --NSD KLIPRKT-KKFYW-DTKKYGGEDSPIVAYSI-LVIAD--IE--KGKSKKLKTVKALVGVTIME KMTFER | 1158 |
| WP_002272766 | 1094 | --NSD KLIPRKT-KKFYW-DTKKYGGEDSPIVAYSI-LVIAD--IE--KGKSKKLKTVKALVGVTIME KMTFER | 1158 |
| WP_002273241 | 1094 | --NSD KLIPRKT-KKFYW-DTKKYGGEDSPIVAYSI-LVIAD--IE--KGKSKKLKTVKALVGVTIME KMTFER | 1158 |
| WP_002275430 | 1094 | --NSD KLIPRKT-KKFYW-DTKKYGGEDSPIVAYSI-LVIAD--IE--KGKSKKLKTVKALVGVTIME KMTFER | 1158 |
| WP_002276448 | 1094 | --NSD KLIPRKT-KKFYW-DTKKYGGEDSPIVAYSI-LVIAD--IE--KGKSKKLKTVKALVGVTIME KMTFER | 1158 |
| WP_002277050 | 1112 | --PLE KLVPLKK----AL-NPEKYGGYQKPTTAYPI-LLIVD---------------TKQLIPISVMD KKRFEQ | 1166 |
| WP_002277364 | 1094 | --NSD KLIPRKT-KKFYW-DTKKYGGEDSPIVAYSI-LVIAD--IE--KGKSKKLKTVKALVGVTIME KMTFER | 1158 |
| WP_002279025 | 1094 | --NSD KLIPRKT-KKFYW-DTKKYGGEDSPIVAYSI-LVIAD--IE--KGKSKKLKTVKALVGVTIME KMTFER | 1158 |
| WP_002279859 | 1094 | --DSD KLIPRKT-KKFYW-DTKKYGGEDSPIVAYSI-LVIAD--IE--KGKSKKLKTVKALVGVTIME KMTFER | 1158 |
| WP_002280230 | 1094 | --NSD KLIPRKT-KKFYW-DTKKYGGEDSPIVAYSI-LVIAD--IE--KGKSKKLKTVKALVGVTIME KMTFER | 1158 |
| WP_002281696 | 1094 | --NSD KLIPRKT-KKFYW-DTKKYGGEDSPIVAYSI-LVIAD--IE--KGKSKKLKTVKALVGVTIME KMTFER | 1158 |
| WP_002282247 | 1112 | --PLE KLVPLKK----AL-NPEKYGGYQKPTTAYPI-LLIVD---------------TKQLIPISVMD KKRFEQ | 1166 |
| WP_002282906 | 1094 | --NSD KLIPRKT-KKFYW-DTKKYGGEDSPIVAYSI-LVIAD--IE--KGKSKKLKTVKALVGVTIME KMTFER | 1158 |
| WP_002283846 | 1094 | --NSD KLIPRKT-KKFYW-DTKKYGGEDSPIVAYSI-LVIAD--IE--KGKSKKLKTVKALVGVTIME KMTFER | 1158 |
| WP_002287255 | 1094 | --NSD KLIPRKT-KKFYW-DTKKYGGEDSPIVAYSI-LVIAD--IE--KGKSKKLKTVKALVGVTIME KMTFER | 1158 |
| WP_002288990 | 1094 | --NSY KLIPRKT-KKFYW-DTKKYGGEDSPIVAYSI-LVIAD--IE--KGKSKKLKTVKALVGVTIME KMTFER | 1158 |
| WP_002289641 | 1094 | --NSD KLIPRKT-KKFYW-DTKKYGGEDSPIVAYSI-LVIAD--IE--KGKSKKLKTVKALVGVTIME KMTFER | 1158 |
| WP_002290427 | 1094 | --DSD KLIPRKT-KKFYW-DTKKYGGEDSPIVAYSI-LVIAD--IE--KGKSKKLKTVKALVGVTIME KMTFER | 1158 |
| WP_002295753 | 1094 | --NSD KLIPRKT-KKFYW-DTKKYGGEDSPIVAYSI-LVIAD--IE--KGKSKKLKTVKALVGVTIME KMTFER | 1158 |
| WP_002296423 | 1094 | --NSD KLIPRKT-KKFYW-DTKKYGGEDSPIVAYSI-LVIAD--IE--KGKSKKLKTVKALVGVTIME KMTFER | 1158 |
| WP_002304487 | 1108 | --NSD KLIPRKT-KKFYW-DTKKYGGEDSPIVAYSI-LVIAD--IE--KGKSKKLKTVKALVGVTIME KMTFER | 1172 |
| WP_002305844 | 1094 | --NSD KLIPRKT-KKFYW-DTKKYGGEDSPIVAYSI-LVIAD--IE--KGKSKKLKTVKALVGVTIME KMTFER | 1158 |
| WP_002307203 | 1094 | --NSD KLIPRKT-KKFYW-DTKKYGGEDSPIVAYSI-LVIAD--IE--KGKSKKLKTVKALVGVTIME KMTFER | 1158 |
| WP_002310390 | 1094 | --DSD KLIPRKT-KKFYW-DTKKYGGEDSPIVAYSI-LVIAD--IE--KGKSKKLKTVKALVGVTIME KMTFER | 1158 |
| WP_002352408 | 1094 | --DSD KLIPRKT-KKFYW-DTKKYGGEDSPIVAYSI-LVIAD--IE--KGKSKKLKTVKALVGVTIME KMTFER | 1158 |
| WP_012997688 | 1094 | --NSD KLIPRKT-KKFYW-DTKKYGGEDSPIVAYSI-LVIAD--IE--KGKSKKLKTVKALVGVTIME KMTFER | 1158 |
| WP_014677909 | 1094 | --NSD KLIPRKT-KKFYW-DTKKYGGEDSPIVAYSI-LVIAD--IE--KGKSKKLKTVKALVGVTIME KMTFER | 1158 |
| WP_019312892 | 1094 | --NSD KLIPRKT-KKFYW-DTKKYGGEDSPIVAYSI-LVIAD--IE--KGKSKKLKTVKALVGVTIME KMTFER | 1158 |
| WP_019313659 | 1094 | --NSD KLIPRKT-KKFYW-DTKKYGGEDSPIVAYSI-LVIAD--IE--KGKSKKLKTVKALVGVTIME KMTFER | 1158 |
| WP_019314093 | 1094 | --NSD KLIPRKT-KKFYW-DTKKYGGEDSPIVAYSI-LVIAD--IE--KGKSKKLKTVKALVGVTIME KMTFER | 1158 |
| WP_019315370 | 1094 | --NSD KLIPRKT-KKFYW-DTKKYGGEDSPIVAYSI-LVIAD--IE--KGKSKKLKTVKALVGVTIME KMTFER | 1158 |
| WP_019803776 | 1094 | --NSD KLIPRKT-KKFYW-DTKKYGGEDSPIVAYSI-LVIAD--IE--KGKSKKLKTVKALVGVTIME KMTFER | 1158 |
| WP_019805234 | 1094 | --DSD KLIPRKT-KKFYW-DTKKYGGEDSPIVAYSI-LVIAD--IE--KGKSKKLKTVKALVGVTIME KMTFER | 1158 |
| WP_024783594 | 1094 | --NSD KLIPRKT-KKFYW-DTKKYGGEDSPIVAYSI-LVIAD--IE--KSKSKKLKTVKALVGVTIME KMTFER | 1158 |
| WP_024784288 | 1112 | --PLE KLVPLKK----AL-NPEKYGGYQKPTTAYPI-LLIVD---------------TKQLIPISVMD KKRFEQ | 1166 |
| WP_024784666 | 1094 | --NSD KLIPRKT-KKEYW-DTKKYGGEDSPIVAYSI-LVIAD--IE--KGKSKKLKTVKALVGVTIME KMTFER | 1158 |
| WP_024784894 | 1094 | --NSD KLIPRKT-KKEYW-DTKKYGGEDSPIVAYSI-LVIAD--IE--KGKSKKLKTVKALVGVTIME KMTFER | 1158 |
| WP_024786433 | 1112 | --PLE KLVPLKK----AL-NPEKYGGYQKPTTAYPI-LLIVD---------------TKQLIPISVMD KKRFEQ | 1166 |
| WP_049473442 | 1094 | --NSD KLIPRKT-KKEYW-DIKKYGGEDSPIVAYSI-LVIAD--IE--KGKSKKLKTVKALVGVTIME KMTFER | 1158 |
| WP_049474547 | 1094 | --NSD KLIPRKT-KKEYW-DIKKYGGEDSPIVAYSI-LVIAD--IE--KGKSKKLKTVKALVGVTIME KMTFER | 1158 |
| EMC03581 | 1087 | --NSD KLIPRKT-KKEYW-DIKKYGGEDSPIVAYSI-LVIAD--IE--KGKSKKLKTVKALVGVTIME KMTFER | 1151 |
| WP_000428612 | 1122 | --NSD KLIPRKT-KDILW-DTTKYGGEDSPVIAYSI-LLIAD--IE--KGKAKRLKTVKILVGITIME KATFEK | 1186 |
| WP_000428613 | 1120 | --NSD KLIPRKT-KDILW-ETTKYGGEDSPVIAYSI-LLIAD--IE--KGKAKKLKTVKILVGITIME KAAFEE | 1184 |
| WP_049523028 | 1115 | --NSD KLIPRKT-KNVQL-DTTKYGGFDSPVIAYSI-LLVAD--VE--KGKSKKLKTVKSLIGITIME KVKFEA | 1179 |
| WP_003107102 | 1084 | --DSD KLIP----RKNNW-DPKKYGGFGSPIIAYSV-LVVAK--VT--KGKSQKIKSVKELVGITIME QNEFEK | 1145 |
| WP_054279288 | 1116 | --KSS KLIP----RKNKWrDTTKYGGENTPTVAYSV-LVVAK--VE--KGKAKKLKPVKELVGITIME RTKFEA | 1178 |
| WP_049531101 | 1125 | vvDAS KLIPIKS-G---L-SPEKYGGYARPTIAYSV-LVIAD--IE--KGKAKKLKRIKEMVGITIQD KKKFEA | 1188 |
| WP_049538452 | 1125 | vvDAS KLIPIKS-G---L-SPEKYGGYARPTIAYSV-LVIAD--IE--KGKIKKLKRIKEMIGITVQD KKIFES | 1188 |
| WP_049549711 | 1127 | vvDAS KLIPIKS-G---L-SPEKYGGYARPTIAYSV-LVIAD--IE--KGKIKKLKRIKEMVGITIQD KKKFEA | 1190 |
| WP_007896501 | 1121 | --NSD KLIE----RKKGW-DPKKYGGEDSPNTAYSI-FVVAK--VA--KRKAQKLKTVKEIVGITIME QAEYEK | 1182 |
| EFR44625 | 1073 | --NSD KLIE----RKKGW-DPKKYGGEDSPNTAYSI-FVVAK--VA--KRKAQKLKTVKEIVGITIME QAEYEK | 1134 |
| WP_002897477 | 1119 | --NSD KLIPRKT-KDILW-DTTKYGGEDSPVIAYSI-LLIAD--IE--KGKAKKLKTVKILVGITIME KAAFEE | 1183 |
| WP_002906454 | 1124 | vvDAS KLIPIKS-S---L-SPEKYGGYARPTIAYSV-LVIAD--IEkgKGKAKKLKRIKEIVGITIQD KKKFES | 1189 |
| WP_009729476 | 1120 | --NSD KLIPRKT-KDILW-DTTKYGGEDSPVIAYSI-LLIAD--IE--KGKAKKLKTVKILVGITIME KDAFEK | 1184 |
| CQR24647 | 1110 | --GSD KLIARKT-KNNYL-STQKYGGFDSPIVAYSI-MFVAD--IE--KGKSKRLKTVKEMIGITIME RSRFES | 1174 |
| WP_000066813 | 1124 | --NSD KLIPRKT-KEILW-DTTKYGGEDSPVIAYSI-LLIAD--IE--KGKAKKLKTVKILVGITIME KATFEK | 1188 |
| WP_009754323 | 1120 | --NSD KLIPRKT-KDILW-DTTKYGGEDSPVIAYSI-LLIAD--IE--KGKAKKLKTVKILVGITIME KAAFEK | 1184 |
| WP_044674937 | 1113 | --DSD KLIPRKT-EKFYL-DIKKYGGEDSPTIAYSV-LLIAD--IE--KGKAKKLKRVKELIGITIME RMAFEK | 1177 |
| WP_044676715 | 1115 | --DSD KLIPRKT-EKFYL-DIKKYGGEDSPTIAYSV-LLIAD--IE--KGKAKKLKRVKELIGITIME RMAFEK | 1179 |
| WP_044680361 | 1115 | --DSD KLIPRKT-EKFYL-DIKKYGGEDSPTIAYSV-LLIAD--IE--KGKAKKLKRVKELIGITIME RMAFEK | 1179 |
| WP_044681799 | 1113 | --DSD KLIPRKT-EKFYL-DIKKYGGEDSPTIAYSV-LLIAD--IE--KGKAKKLKRVKELIGITIME RMAFEK | 1177 |
| WP_049533112 | 1123 | --DSS ENLVGVK-RNL---DPKKYGGYAGISNSYAV-LVKAI--IE--KGVKKKETMVLEFQGISILD RITFEK | 1185 |
| WP_029090905 | 1062 | --SSS KTIP----LKKHL-DTAIYGGYTAVNYASYA---LIQ--FK----KGRKLK--REIIGIPLAV QTRIDN | 1117 |
| WP_006506696 | 1085 | haDKG AVVP---vNKNRS-DVHKYGGFSG--LQYTI----VA--IEgqKKKGKKTELVKKISGVPLHL KAASIN | 1149 |
| AIT42264 | 1115 | --NSD KLIA----RKKDW-DPKKYGGFDSPIVAYSV-LVVAK--VE--KGKSKKLKSVKELLGITIME RSSFEK | 1176 |
| WP_034440723 | 1093 | k-KTE KRIP----IKNNL-DPNIYGGYIEEKMAYYI----AInyLE--NGKTKK-----AIVGISIKD KKDFEG | 1149 |
| AKQ21048 | 1115 | --NSD KLIA----RKKDW-DPKKYGGFDSPIVAYSV-LVVAK--VE--KGKSKKLKSVKELLGITIME RSSFEK | 1176 |
| WP_004636532 | 1093 | --DSS KLIP----VKEGM-DPQKYGGLSQVSEAFAV-VIT----HE--KGKKKQLK--SDLISIPIVD QKAYEQ | 1150 |
| WP_002364836 | 1099 | --PSN KLIP----VKNGL-DPQKYGGFDSPIVAYTV-LF--T--HE--KGK-KPL-IKQEILGITIME KTRFEQ | 1156 |
| WP_016631044 | 1050 | --PSN KLIP----VKNGL-DPQKYGGFDSPVVAYTV-LF--T--HE--KGK-KPL-IKQEILGITIME KTRFEQ | 1107 |
| EMS75795 | 835 | --KPD KLIQ----RKAGW-DVSKYGGFGSPVVAYAV-AFI----YE--KGKAR--KKAKAIEGITIMK QSLFEQ | 892 |
| WP_002373311 | 1099 | --PSN KLIP----VKNGL-DPQKYGGFDSPVVAYTV-LF--T--HE--KGK-KPL-IKQEILGITIME KTRFEQ | 1156 |
| WP_002378009 | 1099 | --PSN KLIP----VKNGL-DPQKYGGFDSPIVAYTV-LF--T--HE--KGK-KPL-IKQEILGITIME KTRFEQ | 1156 |
| WP_002407324 | 1099 | --PSN KLIP----VKNGL-DPQKYGGFDSPIVAYTV-LF--T--HE--KGK-KPL-IKQEILGITIME KTRFEQ | 1156 |
| WP_002413717 | 1099 | --PSN KLIP----VKNGL-DPQKYGGFDSPVVAYTV-LF--T--HE--KGK-KPL-IKQEILGITIME KTRFEQ | 1156 |
| WP_010775580 | 1101 | --PSN KLIP----VKNGL-DPQKYGGFDSPVVAYTV-LF--T--HE--KGK-KPL-IKQEILGITIME KTRFEQ | 1158 |
| WP_010818269 | 1099 | --PSN KLIP----VKNGL-DPQKYGGFDSPIVAYTV-LF--T--HE--KGK-KPL-IKQEILGITIME KTRFEQ | 1156 |
| WP_010824395 | 1099 | --PSN KLIP----VKNGL-DPQKYGGFDSPVVAYTV-LF--T--HE--KGK-KPL-IKQEILGITIME KTRFEQ | 1156 |
| WP_016622645 | 1099 | --PSN KLIP----VKNGL-DPQKYGGFDSPIVAYTV-LF--T--HE--KGK-KPL-IKQEILGITIME KTRFEQ | 1156 |
| WP_033624816 | 1099 | --PSN KLIP----VKNGL-DPQKYGGFDSPVVAYTV-LF--T--HE--KGK-KPL-IKQEILGITIME KTRFEQ | 1156 |
| WP_033625576 | 1099 | --PSN KLIP----VKNGL-DPQKYGGFDSPVVAYTV-LF--T--HE--KGK-KPL-IKQEILGITIME KTKFEQ | 1156 |
| WP_033789179 | 1099 | --PSN KLIP----VKNGL-DPQKYGGFDSPVVAYTV-LF--T--HE--KGK-KPL-IKQEILGITIME KTRFEQ | 1156 |
| WP_002310644 | 1101 | --DSS KLLP----RKNNW-DPAKYGGLGSPNVAYTV-AFT----YE--KGKAR--KRTNALEGITIME REAFEQ | 1158 |
| WP_002312694 | 1102 | --DSS KLLP----RKNNW-DPAKYGGLGSPNVAYTV-AFT----YE--KGKAR--KRTNALEGITIME REAFEQ | 1159 |
| WP_002314015 | 1102 | --DSS KLLP----RKNNW-DPAKYGGLGSPNVAYTV-AFT----YE--KGKAR--KRTNALEGITIME REAFEQ | 1159 |
| WP_002320716 | 1102 | --DSS KLLP----RKNNW-DPAKYGGLGSPNVAYTV-AFT----YE--KGKAR--KRTNALEGITIME REAFEQ | 1159 |
| WP_002330729 | 1101 | --DSS KLLP----RKNNW-DPAKYGGLGSPNVAYTV-AFT----YE--KGKAR--KRTNALEGITIME REAFEQ | 1158 |
| WP_002335161 | 1102 | --DSS KLLP----RKNNW-DPAKYGGLGSPNVAYTV-AFT----YE--KGKAR--KRTNALEGITIME REAFEQ | 1159 |
| WP_002345439 | 1102 | --DSS KLLP----RKNNW-DPTKYGGLGSPNVAYTV-AFT----YE--KGKAR--KRTNALEGITIME REAFEQ | 1159 |
| WP_034867970 | 1092 | --KPD KLIE----RKNNW-DVIKYGGFGSPVIAYAI-AFV----YA--KGKTQ--KKTRAIEGITIME QAAFEK | 1149 |
| WP_047937432 | 1102 | --DSS KLLP----RKNNW-DPAKYGGLGSPNVAYTV-AFT----YE--KGKAR--KRTNALEGITIME REAFEQ | 1159 |
| WP_010720994 | 1092 | --KPD KLIE----RKNNW-DVIKYGGFGSPVIAYAI-AFV----YA--KGKTQ--KKIKAIEGITIME QAAFEK | 1149 |
| WP_010737004 | 1092 | --KPD KLIE----RKNNW-DVIKYGGFGSPVIAYAI-AFV----YA--KGKTQ--KKTRAIEGITIME QAAFEK | 1149 |
| WP_034700478 | 1092 | --KPD KLIE----RKNNW-DVIKYGGFGSPVIAYAI-AFV----YA--KGKTQ--KKTRAIEGITIME QAAFEK | 1149 |
| WP_007209003 | 1090 | --ESQ KLIR----RKQQW-NTKKYGGFDSPVVAYAI---LLS--FD--KGK-RKARSFK-IVGITIQD RESFEG | 1147 |
| WP_023519017 | 1086 | --NPE KLIP----RKASL-DPLKYGGYGSPLVAYTV-IFI----FE--KGKQK--KVIKGIEGITVME QLRFEQ | 1143 |
| WP_010770040 | 1097 | --DSD KLIS----RKTNW-SPKLYGGFDSPQVAYSV-II--T--YE--KGK-KKVRA-KAIVGITIME QSLFKK | 1154 |
| WP_048604708 | 1094 | --DSD KLIS----RKKEW-DTTKYGGFDSPNVAYSV-VI--R--YE--KGK-TRKLV-KTIVGITIME RAAFEK | 1151 |
| WP_010750235 | 1095 | --KPD KLIK----RKNNW-DVTKYGGFGSPVVAYAV-VFT----YE--KGKNH--KKAKAIEGITIME QALFEK | 1152 |
| AII16583 | 1154 | --NSD KLIA----RKKDW-DPKKYGGFDSPIVAYSV-LVVAK--VE--KGKSKKLKSVKELLGITIME RSSFEK | 1215 |
| WP_029073316 | 1100 | hsEKG AKVP---vNKLRS-NVHKYGGFEG--LKYSI----VA--IKgkKKKGKKIIDVNKLVGIPLMY KNVDDE | 1164 |
| WP_031589969 | 1100 | nsDKD ATVP---vNKYRS-NVNKYGGFSG--VNSFI----VA--IKgkKKKGKKVIEVNKLIGIPLMY KNADEE | 1164 |
| KDA45870 | 1079 | --DSG KLLP----RKEGL-DPVKYGGYAKAVESYAV-LITAD-eVK--KGKTKKVKT---LVNIPIID SKKYEA | 1138 |
| WP_039099354 | 1098 | k-ASG QLIPAKQdRPTAL-----YGGYSGKTVAYMC---IVR--IKnkKGDLYKVCGVETSWLAQLKQ KKAFLK | 1170 |
| AKP02966 | 1119 | k---- KLIA----QKKDM-DPNIYGGFSGDNKSSIT---IVK--ID-----NNKIKPVA--IPIRLIN ----DK | 1172 |
| WP_010991369 | 1096 | --NSS KLIP----RKTNW-DPMKYGGLDSPNMAYAV-VI--E--YA--KGK-NKLVFEKKIIRVTIME RKAFEK | 1154 |
| WP_033838504 | 1096 | --NSS KLIS----RKTNW-DPMKYGGLDSPNMAYAV-VI--E--YA--KGK-NKLVFEKKIIRVTIME RKAFEK | 1154 |
| EHN60060 | 1099 | --NSS KLIS----RKTNW-DPMKYGGLDSPNMAYAV-VI--E--YA--KGK-NKLVFEKKIIRVTIME RKAFEK | 1157 |
| EFR89594 | 865 | --NSS KLIP----RKTNW-DPMKYGGLDSPNMAYAV-VI--E--YA--KGK-NKLVFEKKIIRVTIME RKAFEK | 923 |
| WP_038409211 | 1096 | --NSS KLIS----RKADW-NPIKYGGFDGSNMAYSI-VI--E--YE--KRK-KKTVIKKELIQINIME RVAFEK | 1154 |
| EFR95520 | 715 | --NSS KLIS----RKADW-NPIKYGGFDGSNMAYSI-VI--E--YE--KRK-KKTVIKKELIQINIME RVAFEK | 773 |
| WP_003723650 | 1096 | --NSS KLIP----RKENW-DPMKYGGLDSPNMAYAV-II--E--HA--KGK-KKIVIEKKLIQINIME RKMFEK | 1154 |
| WP_003727705 | 1096 | --NSS KLIP----RKENW-DPMKYGGLDSPNMAYAV-II--E--HA--KGK-KKIVIEKKLIQINIME RKMFEK | 1154 |
| WP_003730785 | 1096 | --NSS KLIP----RKENW-DPVKYGGLDSPNMAYAV-II--E--HA--KGK-KKIVIEKKLIQINIME RKMFEK | 1154 |
| WP_003733029 | 1096 | --KSN KLIP----RKKDW-DPIKYGGFDGSKMAYAI-II--E--YE--KQK-RKVRIEKKLIQINIME REAFEK | 1154 |
| WP_003739838 | 1096 | --NSS KLIP----RKENW-DPMKYGGLDSPNMAYAV-II--E--HA--KGK-KKVVFEKKIIRITIME RKAFEK | 1154 |
| WP_014601172 | 1096 | --NSS KLIP----RKENW-DPMKYGGLDSPNMAYAV-II--E--HA--KGK-KKLIFEKKIIRITIME RKMFEK | 1154 |
| WP_023548323 | 1096 | --DSS KLIP----KKTNL-NPIKYGGFEGSNMAYAI-II--E--HE--KRK-KKVTIEKKLIQINIME RKAFEK | 1154 |
| WP_031665337 | 1096 | --NSS KLIP----RKENW-DPMKYGGLDSPNMAYAV-II--E--HA--KGK-KRIVIEKKLIQINIME RKMFEK | 1154 |
| WP_031669209 | 1096 | --KSN KLIP----RKKDW-DPIKYGGFDGSKMAYAI-II--E--YE--KQK-RKVRIEKKLIQINIME REAFEK | 1154 |
| WP_033920898 | 1096 | --DSS KLIP----KKTNL-NPIKYGGFEGSNMAYAI-II--E--HE--KRK-KKVTIEKKLIQINIME RKAFEK | 1154 |
| AKI42028 | 1099 | --NSS KLIP----RKENW-DPMKYGGLDSPNMAYAV-II--E--HA--KGK-KKLIFEKKIIRITIME RKMFEK | 1157 |
| AKI50529 | 1099 | --DSS KLIP----KKTNL-NPIKYGGFEGSNMAYAI-II--E--HE--KRK-KKVTIEKKLIQINIME RKAFEK | 1157 |
| EFR83390 | 544 | --NSS KLIP----RKENW-DPMKYGGLDSPNMAYAV-II--E--HA--KGK-KKIVIEKKLIQINIME RKMFEK | 602 |
| WP_046323366 | 1096 | --NSS KLIP----RKADW-DPIKYGGFDGSNMAYAI-VI--E--HE--KRK-KKTVIKKELIQINIME RTAFEK | 1154 |
| AKE81011 | 1131 | --NSD KLIA----RKKDW-DPKKYGGFDSPIVAYSV-LVVAK--VE--KGKSKKLKSVKELLGITIME RSSFEK | 1192 |
| CUO82355 | 1089 | hsAKG AVIP---vNKNRK-DVNKYGGFSG--LQYVI----AA--IEgtKKKGKKLVKVRKLSGIPLYL KQADIK | 1153 |
| WP_033162887 | 1090 | hsEKG ATVP---lNKYRA-DVHKYGGFGN--VQSII----VA--IEgkKKKGKKLIDVRKLISIPLHL KNAPVE | 1154 |
| AGZ01981 | 1148 | --NSD KLIA----RKKDW-DPKKYGGFDSPIVAYSV-LVVAK--VE--KGKSKKLKSVKELLGITIME RSSFEK | 1209 |
| AKA60242 | 1115 | --NSD KLIA----RKKDW-DPKKYGGFDSPIVAYSV-LVVAK--VE--KGKSKKLKSVKELLGITIME RSSFEK | 1176 |
| AKS40380 | 1115 | --NSD KLIA----RKKDW-DPKKYGGFDSPIVAYSV-LVVAK--VE--KGKSKKLKSVKELLGITIME RSSFEK | 1176 |
| 4UN5_B | 1119 | --NSD KLIA----RKKDW-DPKKYGGFDSPIVAYSV-LVVAK--VE--KGKSKKLKSVKELLGITIME RSSFEK | 1180 |
| WP_010922251 | 1177 | [chemical structure] | 1239 |
| WP_039695303 | 1186 | NPV---EFLE---NKGYHN--I-REDKLIK--LPKYSLFE---FEGGRRRLLAS ASELQKGNEMVLPGYLVELLYHA | 1248 |
| WP_045635197 | 1184 | NPI---TFLE---NKGYHN--V-RKENILC--LPKYSLFE---LENGRRRLLAS AKELQKGNEIVLPVYLTTLLYHS | 1246 |
| 5AXW_A | 913 | KPYrfdVYLD---NGVYKFvtV-KNLDVIK----KENYYE---VNSKAYEEAKK -KKISNQAEFIASFYNNDLIKIN | 978 |
| WP_009880683 | 861 | DPV---DFLE---AKGYKE--V-RKDLIIK--LPKYSLFE---LENGRKRMLAS -GELQKGNELALPSKYVNFLYLA | 923 |
| WP_010922251 | 1177 | NPI---DFLE---AKGYKE--V-KKDLIIK--LPKYSLFE---LENGRKRMLAS -GELQKGNELALPSKYVNFLYLA | 1239 |
| WP_011054416 | 1177 | DPI---DFLE---AKGYKE--V-RKDLIIK--LPKYSLFE---LENGRKRMLAS -GELQKGNELALPSKYVNFLYLA | 1239 |
| WPO11284745 | 1177 | NPI---DFLE---AKGYKE--V-RKDLIVK--LPKYSLFE---LENGRKRMLAS -GELQKGNELALPSKYVNFLYLA | 1239 |
| WP_011285506 | 1177 | NPI---DFLE---AKGYKE--V-KKDLIIK--LPKYSLFE---LENGRKRMLAS -GELQKGNELALPSKYVNFLYLA | 1239 |
| WP_011527619 | 1177 | NPI---DFLE---AKGYKE--V-RKDLIIK--LPKYSLFE---LENGRKRMLAS -GELQKGNELALPSKYVNFLYLA | 1239 |
| WP_012560673 | 1177 | DPV---DFLE---AKGYKE--V-RKDLIIK--LPKYSLFE---LENGRKRMLAS -GELQKGNELALPSKYVNFLYLA | 1239 |
| WP_014407541 | 1176 | NPI---DFLE---AKGYKE--V-KKDLIIK--LPKYSLFE---LENGRKRMLAS -GELQKGNELALPSKYVNFLYLA | 1238 |
| WP_020905136 | 1177 | NPI---DFLE---AKGYKE--V-KKDLIIK--LPKYSLFE---LENGRKRMLAS -GELQKGNELALPSKYVNFLYLA | 1239 |
| WP_023080005 | 1176 | NPI---DFLE---AKGYKE--V-RKDLIIK--LPKYSLFE---LENGRKRMLAS -GELQKGNELALPSKYVNFLYLA | 1238 |
| WP_023610282 | 1176 | NPI---DFLE---AKGYKE--V-RKDLIIK--LPKYSLFE---LENGRKRMLAS -GELQKGNELALPSKYVNFLYLA | 1238 |
| WP_030125963 | 1177 | NPI---DFLE---AKGYKE--V-RKDLIIK--LPKYSLFE---LENGRKRMLAS -GELQKGNELALPSKYVNFLYLA | 1239 |
| WP_030126706 | 1177 | NPI---DFLE---AKGYKE--V-RKDLIIK--LPKYSLFE---LENGRKRMLAS -GELQKGNELALPSKYVNFLYLA | 1239 |
| WP_031488318 | 1177 | NPI---DFLE---AKGYKE--V-RKDLIIK--LPKYSLFE---LENGRKRMLAS -GELQKGNELALPSKYVNFLYLA | 1239 |
| WP_032460140 | 1177 | DPV---DFLE---AKGYKE--V-RKDLIIK--LPKYSLFE---LENGRKRMLAS -GELQKGNELALPSKYVNFLYLA | 1239 |
| WP_032461047 | 1177 | DPV---DFLE---AKGYKE--V-RKDLIIK--LPKYSLFE---LENGRKRMLAS -GELQKGNELALPSKYVNFLYLA | 1239 |
| WP_032462016 | 1177 | NPI---DFLE---AKGYKE--V-KKDLIIK--LPKYSLFE---LENGRKRMLAS -GELQKGNELALPSKYVNFLYLA | 1239 |
| WP_032462936 | 1177 | NPI---DFLE---AKGYKE--V-RKDLIIK--LPKYSLFE---LENGRKRMLAS -GELQKGNELALPSKYVNFLYLA | 1239 |
| WP_032464890 | 1177 | NPI---DFLE---AKGYKE--V-RKDLIIK--LPKYSLFE---LENGRKRMLAS -GELQKGNELALPSKYVNFLYLA | 1239 |
| WP_033888930 | 1002 | NPI---DFLE---AKGYKE--V-KKDLIIK--LPKYSLFE---LENGRKRMLAS -GELQKGNELALPSKYVNFLYLA | 1064 |
| WP_038431314 | 1177 | NPI---DFLE---AKGYKE--V-RKDLIIK--LPKYSLFE---LENGRKRMLAS -GELQKGNELALPSKYVNFLYLA | 1239 |
| WP_038432938 | 1176 | NPI---DFLE---AKGYKE--V-RKDLIIK--LPKYSLFE---LENGRKRMLAS -GELQKGNELALPSKYVNFLYLA | 1238 |
| WP_038434062 | 1177 | NPI---DFLE---AKGYKE--V-RKDLIIK--LPKYSLFE---LENGRKRMLAS -GELQKGNELALPSKYVNFLYLA | 1239 |
| BAQ51233 | 1088 | NPI---DFLE---AKGYKE--V-KKDLIIK--LPKYSLFE---LENGRKRMLAS -GELQKGNELALPSKYVNFLYLA | 1150 |
| KGE60162 | 352 | DPI---DFLE---AKGYKE--V-RKDLIIK--LPKYSLFE---LENGRKRMLAS -GELQKGNELALPSKYVNFLYLA | 414 |
| KGE60856 | 115 | DPI---DFLE---AKGYKE--V-RKDLIIK--LPKYSLFE---LENGRKRMLAS -GELQKGNELALPSKYVNFLYLA | 177 |
| WP_002989955 | 1177 | NPI---DFLE---AKGYKE--V-RKDLIIK--LPKYSLFE---LENGRKRMLAS -GELQKGNELALPSKYVNFLYLA | 1239 |
| WP_003030002 | 1159 | HPV---DFLE---QRGYRN--V-RLEKIIK--LPKYSLFE---LENKRRRLLAS ARELQKGNELVIPQRFTTLLYHS | 1221 |
| WP_003065552 | 1187 | NPV---EFLE---NKGYHN--I-REDKLIK--LPKYSLFE---FEGGKRRLLAS ASELQKGNEMVIPGHLVKLLYHA | 1249 |
| WP_001040076 | 1178 | NPS---AFLE---SKGYLN--I-RTDKLII--LPKYSLFE---LENGRRRLLAS AGELQKGNELALPTQFMKFLYLA | 1240 |
| WP_001040078 | 1186 | NPS---AFLE---SKGYLN--I-RDDKLMI--LPKYSLFE---LENGRRRLLAS AGELQKGNELALPTQFMKFLYLA | 1248 |
| WP_001040080 | 1178 | NPS---AFLE---SKGYLN--I-RADKLII--LPKYSLFE---LENGRRRLLAS AGELQKGNELALPTQFMKFLYLA | 1240 |
| WP_001040081 | 1178 | NPS---AFLE---SKGYLN--I-RADKLII--LPKYSLFE---LENGRRRLLAS AGETIDRLQKGNELALPTQFMKFLYLA | 1240 |
| WP_001040083 | 1178 | NPS---AFLE---SKGYLN--I-RADKLII--LPKYSLFE---LENGRRRLLAS AGELQKGNELALPTQFMKFLYLA | 1240 |
| WP_001040085 | 1178 | NPS---AFLE---SKGYLN--I-RADKLII--LPKYSLFE---LENGRRRLLAS AGELQKGNELALPTQFMKFLYLA | 1240 |
| WP_001040087 | 1178 | NPS---AFLE---SKGYLN--I-RADKLII--LPKYSLFE---LENGRRRLLAS AGELQKGNELALPTQFMKFLYLA | 1240 |
| WP_001040088 | 1178 | NPS---AFLE---SKGYLN--I-RADKLII--LPKYSLFE---LENGRRRLLAS AGELQKGNELALPTQFMKFLYLA | 1240 |
| WP_001040089 | 1178 | NPS---AFLE---SKGYLN--I-RDDKLMI--LPKYSLFE---LENGRRRLLAS AGELQKGNELALPTQFMKFLYLA | 1240 |
| WP_001040090 | 1178 | NPS---AFLE---SKGYLN--I-RADKLII--LPKYSLFE---LENGRRRLLAS AGELQKGNELALPTQFMKFLYLA | 1240 |
| WP_001040091 | 1178 | NPS---AFLE---SKGYLN--I-RADKLII--LPKYSLFE---LENGRRRLLAS AGELQKGNELALPTQFMKFLYLA | 1240 |
| WP_001040092 | 1178 | NPS---AFLE---SKGYLN--I-RTDKLII--LPKYSLFE---LENGRRRLLAS AGELQKGNELALPTQYMKFLYLA | 1240 |
| WP_001040094 | 1178 | NPS---AFLE---SKGYLN--I-RDDKLMI--LPKYSLFE---LENGRRRLLAS AGELQKGNELALPTQFMKFLYLA | 1240 |
| WP_001040095 | 1178 | NPS---AFLE---SKGYLN--I-RTDKLII--LPKYSLFE---LENGRRRLLAS AGELQKGNELALPTQYMKFLYLA | 1240 |
| WP_001040096 | 1178 | NPS---AFLE---SKGYLN--I-RTDKLII--LPKYSLFE---LENGRRRLLAS AGELQKGNELALPTQYMKFLYLA | 1240 |
| WP_001040097 | 1178 | NPS---AFLE---SKGYLN--I-RDDKLMI--LPKYSLFE---LENGRRRLLAS ADELQKGNELALPTQFMKFLYLA | 1240 |
| WP_001040098 | 1178 | NPS---AFLE---SKGYLN--I-RDDKLMI--LPKYSLFE---LENGRRRLLAS AGELQKGNELALPTQFMKFLYLA | 1240 |
| WP_001040099 | 1178 | NPS---AFLE---SKGYLN--I-RDDKLMI--LPKYSLFE---LENGRRRLLAS AGELQKGNELALPTQFMKFLYLA | 1240 |
| WP_001040100 | 1178 | NPS---AFLE---SKGYLD--I-RDDKLMI--LPKYSLFE---LENGRRRLLAS AGELQKGNELALPTQFMKFLYLA | 1240 |
| WP_001040104 | 1178 | NPS---AFLE---SKGYLN--I-RADKLII--LPKYSLFE---LENGRRRLLAS AGELQKGNELALPTQFMKFLYLA | 1240 |
| WP_001040105 | 1178 | NPS---AFLE---SKGYLN--I-RADKLII--LPKYSLFE---LENGRRRLLAS AGELQKGNELALPTQFMKFLYLA | 1240 |
| WP_001040106 | 1178 | NPS---AFLE---SKGYLN--I-RDDKLMI--LPKYSLFE---LENGRRRLLAS AGELQKGNELALPTQYMKFLYLA | 1240 |
| WP_001040107 | 1178 | NPS---AFLE---SKGYLN--I-RDDKLMI--LPKYSLFE---LENGRRRLLAS AGELQKGNELALPTQYMKFLYLA | 1240 |
| WP_001040108 | 1178 | NPS---AFLE---SKGYLN--I-RDDKLMI--LPKYSLFE---LENGRRRLLAS AGELQKGNELALPTQYMKFLYLA | 1240 |
| WP_001040109 | 1178 | NPS---AFLE---SKGYLN--I-RDDKLMI--LPKYSLFE---LENGRRRLLAS AGELQKGNELALPTQYMKFLYLA | 1240 |
| WP_001040110 | 1178 | NPS---AFLE---SKGYLN--I-RDDKLMI--LPKYSLFE---LENGRRRLLAS AGELQKGNELALPTQYMKFLYLA | 1240 |
| WP_015058523 | 1178 | NPS---AFLE---SKGYLN--I-RTDKLII--LPKYSLFE---LENGRRRLLAS AGELQKGNELALPTQYMKFLYLA | 1240 |
| WP_017643650 | 1178 | NPS---AFLE---SKGYLN--I-RDDKLMI--LPKYSLFE---LENGRRRLLAS ADELQKGNELALPTQFMKFLYLA | 1240 |
| WP_017647151 | 1178 | NPS---AFLE---SKGYLN--I-RDDKLMI--LPKYSLFE---LENGRRRLLAS AGELQKGNELALPTQFMKFLYLA | 1240 |
| WP_017648376 | 1178 | NPS---AFLE---SKGYLN--I-RDDKLMI--LPKYSLFE---LENGRRRLLAS AGELQKGNELALPTQFMKFLYLA | 1240 |
| WP_017649527 | 1178 | NPS---AFLE---SKGYLN--I-RADKLII--LPKYSLFE---LENGRRRLLAS AGELQKGNELALPTQFMKFLYLA | 1240 |
| WP_017771611 | 1178 | NPS---AFLE---SKGYLN--I-RDDKLMI--LPKYSLFE---LENGRRRLLAS AGELQKGNELALPTQYMKFLYLA | 1240 |
| WP_017771984 | 1178 | NPS---AFLE---SKGYLN--I-RADKLII--LPKYSLFE---LENGRRRLLAS AGELQKGNELALPTQFMKFLYLA | 1240 |
| CFQ25032 | 1178 | NPS---AFLE---SKGYLN--I-RADKLII--LPKYSLFE---LENGRRRLLAS AGELQKGNELALPTQFMKFLYLA | 1240 |
| CFV16040 | 1178 | NPS---AFLE---SKGYLN--I-RADKLII--LPKYSLFE---LENGRRRLLAS AGELQKGNELALPTQFMKFLYLA | 1240 |
| KLJ37842 | 1178 | NPS---AFLE---SKGYLN--I-RADKLII--LPKYSLFE---LENGRRRLLAS AGELQKGNELALPTQFMKFLYLA | 1240 |
| KLJ72361 | 1178 | NPS---AFLE---SKGYLN--I-RADKLII--LPKYSLFE---LENGRRRLLAS AGELQKGNELALPTQFMKFLYLA | 1240 |
| KLL20707 | 1192 | NPS---AFLE---SKGYLN--I-RADKLII--LPKYSLFE---LENGRRRLLAS AGELQKGNELALPTQFMKFLYLA | 1254 |
| KLL42645 | 1178 | NPS---AFLE---SKGYLN--I-RDDKLMI--LPKYSLFE---LENGRRRLLAS AGELQKGNELALPTQYMKFLYLA | 1240 |
| WP_047207273 | 1178 | NPS---AFLE---SKGYLN--I-RADKLII--LPKYSLFE---LENGRRRLLAS AGELQKGNELALPTQFMKFLYLA | 1240 |
| WP_047209694 | 1178 | NPS---AFLE---SKGYLN--I-RDDKLMI--LPKYSLFE---LENGRRRLLAS AGELQKGNELALPTQFMKFLYLA | 1240 |
| WP_050198062 | 1178 | NPS---AFLE---SKGYLN--I-RADKLII--LPKYSLFE---LENGRRRLLAS AGELQKGNELALPTQFMKFLYLA | 1240 |
| WP_050201642 | 1178 | NPS---AFLE---SKGYLN--I-RADKLII--LPKYSLFE---LENGRRRLLAS AGELQKGNELALPTQFMKFLYLA | 1240 |
| WP_050204027 | 1178 | NPS---AFLE---SKGYLN--I-RDDKLMI--LPKYSLFE---LENGRRRLLAS AGELQKGNELALPTQYMKFLYLA | 1240 |
| WP_050881965 | 1178 | NLS---AFLE---SKGYLN--I-RADKLII--LPKYSLFE---LENGRRRLLAS AGELQKGNELALPTQFMKFLYLA | 1240 |
| WP_050886065 | 1178 | NPS---AFLE---SKGYLN--I-RADKLII--LPKYSLFE---LENGRRRLLAS AGELQKGNELALPTQFMKFLYLA | 1240 |
| AHN30376 | 1178 | NPS---AFLE---SKGYLN--I-RTDKLII--LPKYSLFE---LENGRRRLLAS AGELQKGNELALPTQYMKFLYLA | 1240 |
| EAO78426 | 1178 | NPS---AFLE---SKGYLN--I-RADKLII--LPKYSLFE---LENGRRRLLAS AGELQKGNELALPTQFMKFLYLA | 1240 |
| CCW42055 | 1178 | NPS---AFLE---SKGYLN--I-RTDKLII--LPKYSLFE---LENGRRRLLAS AGELQKGNELALPTQFMKFLYLA | 1240 |
| WP_003041502 | 1186 | DKR---AFLL---GKGYKD--I-K--KIIE--LPKYSLFE---LKDGSRRMLAS RGEIHKGNELFVPQKFTTLLYHA | 1253 |
| WP_037593752 | 1160 | NPV---DFLE---QRGYRN--V-RLEKIIK--LPKYSLFE---LENKRRRLLAS ARELQKGNELVIPQRFTTLLYHS | 1222 |
| WP_049516684 | 1160 | HPV---DFLE---QRGYRN--V-RLEKIIK--LPKYSLFE---LENKRRRLLAS ARELQKGNELVIPQRFTTLLYHS | 1222 |
| GAD46167 | 1159 | NPV---DFLE---QRGYRN--V-RLEKIIK--LPKYSLFE---LENKRRRLLAS ARELQKGNELVIPQRFTTLLYHS | 1221 |
| WP_018363470 | 1191 | NPV---EFLK---NKGYQN--V-QEDKLMK--LPKYSLFE---FEGGRRRLLAS ATELQKGNEIMLSAHLVALLYHA | 1253 |
| WP_003043819 | 1186 | DPI---GFLE---AKGYKD--I-KKELIFK--LPKYSLFE---LENGRRRMLAS --ELQKANELVLPQHLVRLLYYT | 1248 |
| WP_006269658 | 1159 | NPV---DFLE---QRGYRN--V-RLEKIIK--LPKYSLFE---LENKRRRLLAS AKELQKGNELVIPQRFTTLLYHS | 1221 |
| WP_048800889 | 1179 | NPI---MFLE---SKGYRN--I-QKDKLIK--LPKYSLFE---FEGGRRRLLAS AVELQKGNEMVLPQYLNNLLYHA | 1241 |
| WP_012767106 | 1178 | NPL---KFIE---DKGYGN--V-QIDKCIK--LPKYSLFE---FENGTRRMLAS RGDLQKANEMFLPAKLVTLLY-- | 1245 |
| WP_014612333 | 1178 | NPL---KFIE---DKGYGN--V-QIDKCIK--LPKYSLFE---FENGTRRMLAS RGDLQKANEMFLPAKLVTLLY-- | 1245 |
| WP_015017095 | 1178 | NPL---KFIE---DKGYGN--V-QIDKCIK--LPKYSLFE---FENGTRRMLAS RGDLQKANEMFLPAKLVTLLY-- | 1245 |
| WP_015057649 | 1178 | NPL---KFIE---DKGYGN--V-QIDKCIK--LPKYSLFE---FENGTRRMLAS RGDLQKANEMFLPAKLVTLLY-- | 1245 |
| WP_048327215 | 1178 | NPL---KFIE---DKGYGN--V-QIDKCIK--LPKYSLFE---FENGTRRMLAS RGDLQKANEMFLPAKLVTLLY-- | 1245 |
| WP_049519324 | 1178 | NPL---KFIE---DKGYGN--V-QIDKCIK--LPKYSLFE---FENGTRRMLAS RGDLQKANEMFLPAKLVTLLY-- | 1245 |
| WP_012515931 | 1157 | NPV---VFLE---ARGYRE--I-QEHLIIK--LPKYSLFE---LENGRRRLLAS -SELQKGNELFLPVDYMTFLYLA | 1219 |
| WP_021320964 | 1157 | NPV---VFLE---AKGYRE--I-QEHLIIK--LPKYSLFE---LENGRRRLLAS -SELQKGNELFLPVDYMTFLYLA | 1219 |
| WP_037581760 | 1157 | NPV---VFLE---AKGYRE--I-QEHLIIK--LPKYSLFE---LENGRRRLLAS -SELQKGNELFLPVDYMTFLYLA | 1219 |
| WP_004232481 | 1189 | NPV---SFLE---KKGYHN--V-QEDKLIK--LPKYSLFE---FEGGRRRLLAS ATELQKGNEVVLPQYMVNLLYHS | 1251 |
| WP_009854540 | 1184 | NPV---EFLE---NKGYHN--I-REDKLIK--LPKYSLFE---FEGGRRRLLAS ASELQKGNEMVLPGYLVELLYHA | 1246 |
| WP_012962174 | 1185 | NPV---VFLE---KKGYQN--V-QEDNLIK--LPKYSLFE---FEGGRRRLLAS ASELQKGNEVVLSRHLVELLYHA | 1247 |
| WP_039695303 | 1186 | NPV---EFLE---NKGYHN--I-REDKLIK--LPKYSLFE---FEGGRRRLLAS ASELQKGNEMVLPGYLVELLYHA | 1248 |
| WP_014334983 | 1189 | NPV---SFLE---KKGYHN--V-QEDKLIK--LPKYSLFE---FEGGRRRLLAS ATELQKGNEVMLPAHLVELLYHA | 1251 |
| WP_003099269 | 1177 | DPI---AFLE---KKGYQD--I-QTSSIIK--LPKYSLFE---LENGRKRLLAS --ELQKGNELALPNKYVKFLYLA | 1239 |
| AHY15608 | 1177 | DPI---AFLE---KKGYQD--I-QTSSIIK--LPKYSLFE---LENGRKRLLAS --ELQKGNELALPNKYVKFLYLA | 1239 |
| AHY17476 | 1177 | DPI---AFLE---KKGYQD--I-QTSSIIK--LPKYSLFE---LENGRKRLLAS --ELQKGNELALPNKYVKFLYLA | 1239 |
| ESR09100 | 9 | DPI---AFLE---KKGYQD--I-QTSSIIK--LPKYSLFE---LENGRKRLLAS -KELQKGNELALPNKYVKFLYLA | 71 |
| AGM98575 | 1177 | DPI---AFLE---KKGYQD--I-QTSSIIK--LPKYSLFE---LENGRKRLLAS --ELQKGNELALPNKYVKFLYLA | 1239 |
| ALF27331 | 1159 | NPV---AFLE---RKGYRN--V-QEENIVK--LPKYSLFE---LENGRRRLLAS ARELQKGNEIVLPNHLGTMLYHA | 1221 |
| WP_018372492 | 1168 | EPEr---FLA---QKGFER--V-EKT--IK--LPKYSLFE---MEKGRRRLLAS SGELQKGNQVLLPEHLIRLLSYA | 1228 |
| WP_045618028 | 1189 | NPI---AYLE---ECGYKN--I-NPNLIIK--LPKYSLFE---FNNGQRRLLAS SIELQKGNELIVPYHFTALLYHA | 1251 |
| WP_045635197 | 1184 | NPI---TFLE---NKGYHN--V-RKENILC--LPKYSLFE---LENGRRRLLAS AKELQKGNEIVLPVYLTTLLYHS | 1246 |
| WP_002263549 | 1159 | DPV---AFLE---RKGYRN--V-QEENIIK--LPKYSLFK---LENGRKRLLAS ARELQKGNEIVLPNHLGTLLYHA | 1221 |
| WP_002263887 | 1159 | DPV---AFLE---RKGYRN--V-QEENIIK--LPKYSLFK---LENGRKRLLAS ARELQKGNEIVLPNHLGTLLYHA | 1221 |
| WP_002264920 | 1159 | DPV---AFLE---RKGYRN--V-QEENIIK--LPKYSLFK---LENGRKRLLAS ARELQKGNEIVLPNHLGTLLYHA | 1221 |
| WP_002269043 | 1159 | DPV---AFLE---RKGYRN--V-QEENIIK--LPKYSLFK---LENGRKRLLAS ARELQKGNEIVLPNHLGTLLYHA | 1221 |
| WP_002269448 | 1159 | DPV---AFLE---RKGYRN--V-QEENIIK--LPKYSLFK---LENGRKRLLAS ARELQKGNEIVLPNHLGTLLYHA | 1221 |
| WP_002271977 | 1159 | DPV---AFLE---RKGYRN--V-QEENIIK--LPKYSLFK---LENGRKRLLAS ARELQKGNEIVLPNHLGTLLYHA | 1221 |
| WP_002272766 | 1159 | DPV---AFLE---RKGYRN--V-QEENIIK--LPKYSLFK---LENGRKRLLAS ARELQKGNEIVLPNHLGTLLYHA | 1221 |
| WP_002273241 | 1159 | DPV---AFLE---RKGYRN--V-QEENIIK--LPKYSLFK---LENGRKRLLAS ARELQKGNEIVLPNHLGTLLYHA | 1221 |
| WP_002275430 | 1159 | DPV---AFLE---RKGYRN--V-QEENIIK--LPKYSLFK---LENGRKRLLAS ARELQKGNEIVLPNHLGTLLYHA | 1221 |
| WP_002276448 | 1159 | DPV---AFLE---RKGYRN--V-QEENIIK--LPKYSLFK---LENGRKRLLAS ARELQKGNEIVLPNHLGTLLYHA | 1221 |
| WP_002277050 | 1167 | NPV---KFLK---DKGYQQ--I-EKNNFVK--LPKYTLVD---IGNGIKRLWAS SKEVHKGNQLVVSKKSQDLLYHA | 1229 |
| WP_002277364 | 1159 | DPV---AFLE---RKGYRN--V-QEENIIK--LPKYSLFK---LENGRKRLLAS ARELQKGNEIVLPNHLGTLLYHA | 1221 |
| WP_002279025 | 1159 | DPV---AFLE---RKGYRN--V-QEENIIK--LPKYSLFK---LENGRKRLLAS ARELQKGNEIVLPNHLGTLLYHA | 1221 |
| WP_002279859 | 1159 | DPV---AFLE---RKGYRN--V-QEENIIK--LPKYSLFK---LENGRKRLLAS ARELQKGNEIVLPNHLGTLLYHA | 1221 |
| WP_002280230 | 1159 | DPV---AFLE---RKGYRN--V-QEENIIK--LPKYSLFK---LENGRKRLLAS ARELQKGNEIVLPNHLGTLLYHA | 1221 |
| WP_002281696 | 1159 | DPV---AFLE---RKGYRN--V-QEENIIK--LPKYSLFK---LENGRKRLLAS ARELQKGNEIVLPNHLGTLLYHA | 1221 |
| WP_002282247 | 1167 | NPV---KFLK---DKGYQQ--I-EKNNFVK--LPKYTLVD---IGNGIKRLWAS SKEVHKGNQLVVSKKSQDLLYHA | 1229 |
| WP_002282906 | 1159 | DPV---AFLE---RKGYRN--V-QEENIIK--LPKYSLFK---LENGRKRLLAS ARELQKGNEIVLPNHLGTLLYHA | 1221 |
| WP_002283846 | 1159 | DPV---AFLE---RKGYRN--V-QEENIIK--LPKYSLFK---LENGRKRLLAS ARELQKGNEIVLPNHLGTLLYHA | 1221 |
| WP_002287255 | 1159 | DPV---AFLE---RKGYRN--V-QEENIIK--LPKYSLFK---LENGRKRLLAS ARELQKGNEIVLPNHLGTLLYHA | 1221 |
| WP_002288990 | 1159 | DPV---AFLE---RKGYRN--V-QEENIIK--LPKYSLFK---LENGRKRLLAS ARELQKGNEIVLPNHLGTLLYHA | 1221 |
| WP_002289641 | 1159 | DPV---AFLE---RKGYRN--V-QEENIIK--LPKYSLFK---LENGRKRLLAS ARELQKGNEIVLPNHLGTLLYHA | 1221 |
| WP_002290427 | 1159 | DPV---AFLE---RKGYRN--V-QEENIIK--LPKYSLFK---LENGRKRLLAS ARELQKGNEIVLPNHLGTLLYHA | 1221 |
| WP_002295753 | 1159 | DPI---AFLE---RKGYRN--V-QEENIIK--LPKYSLFK---LENGRKRLLAS ARELQKGNEIVLPNHLGTLLYHA | 1221 |
| WP_002296423 | 1159 | DPV---AFLE---RKGYRN--V-QEENIIK--LPKYSLFK---LENGRKRLLAS ARELQKGNEIVLPNHLGTLLYHA | 1221 |
| WP_002304487 | 1173 | DPV---AFLE---RKGYRN--V-QEENIIK--LPKYSLFK---LENGRKRLLAS ARELQKGNEIVLPNHLETLLYHA | 1235 |
| WP_002305844 | 1159 | DPV---AFLE---RKGYRN--V-QEENIIK--LPKYSLFK---LENGRKRLLAS ARELQKGNEIVLPNHLGTLLYHA | 1221 |
| WP_002307203 | 1159 | DPI---AFLE---RKGYRN--V-QEENIIK--LPKYSLFK---LENGRKRLLAS ARELQKGNEIVLPNHLGTLLYHA | 1221 |
| WP_002310390 | 1159 | DPV---AFLE---RKGYRN--V-QEENIIK--LPKYSLFK---LENGRKRLLAS ARELQKGNEIVLPNHLGTLLYHA | 1221 |
| WP_002352408 | 1159 | DPV---AFLE---RKGYRN--V-QEENIIK--LPKYSLFK---LENGRKRLLAS ARELQKGNEIVLPDHLGTLLYHA | 1221 |
| WP_012997688 | 1159 | DPV---AFLE---RKGYRN--V-QEENIIK--LPKYSLFK---LENGRKRLLAS ARELQKGNEIVLPNHLGTLLYHA | 1221 |
| WP_014677909 | 1159 | DPV---AFLE---RKGYRN--V-QEENIIK--LPKYSLFK---LENGRKRLLAS ARELQKGNEIVLPNHLGTLLYHA | 1221 |
| WP_019312892 | 1159 | DPV---AFLE---RKGYRN--V-QEENIIK--LPKYSLFK---LENGRKRLLAS ARELQKGNEIVLPNHLGTLLYHA | 1221 |
| WP_019313659 | 1159 | DPV---AFLE---RKGYRN--V-QEENIIK--LPKYSLFK---LENGRKRLLAS ARELQKGNEIVLPNHLGTLLYHA | 1221 |
| WP_019314093 | 1159 | DPI---AFLE---RKGYRN--V-QEENIIK--LPKYSLFK---LENGRKRLLAS ARELQKGNEIVLPNHLGTLLYHA | 1221 |
| WP_019315370 | 1159 | DPV---AFLE---RKGYRN--V-QEENIIK--LPKYSLFK---LENGRKRLLAS ARELQKGNEIVLPNHLGTLLYHA | 1221 |
| WP_019803776 | 1159 | DPV---AFLE---RKGYRN--V-QEENIIK--LPKYSLFK---LENGRKRLLAS ARELQKGNEIVLPNHLGTLLYHA | 1221 |
| WP_019805234 | 1159 | DPV---AFLE---RKGYRN--V-QEENIIK--LPKYSLFK---LENGRKRLLAS ARELQKGNEIVLPNHLGTLLYHA | 1221 |
| WP_024783594 | 1159 | DPV---AFLE---RKGYRN--V-QEENIIK--LPKYSLFK---LENGRKRLLAS ARELQKGNEIVLPNHLGTLLYHA | 1221 |
| WP_024784288 | 1167 | NPV---KFLK---DKGYQQ--I-EKNNFVK--LPKYTLVD---IGNGIKRLWAS SKEVHKGNQLVVSKKSQDLLYHA | 1229 |
| WP_024784666 | 1159 | DPV---AFLE---RKGYRN--V-QEENIIK--LPKYSLFK---LENGRKRLLAS ARELQKGNEIVLPNHLGTLLYHA | 1221 |
| WP_024784894 | 1159 | DPV---AFLE---RKGYRN--V-QEENIIK--LPKYSLFK---LENGRKRLLAS ARELQKGNEIVLPNHLGTLLYHA | 1221 |
| WP_024786433 | 1167 | NPV---KFLK---DKGYQQ--I-EKNNFVK--LPKYTLVD---IGNGIKRLWAS SKEVHKGNQLVVSKKSQDLLYHA | 1229 |
| WP_049473442 | 1159 | DPV---AFLE---RKGYRN--V-QEENIIK--LPKYSLFK---LENGRKRLLAS ARELQKGNEIVLPNHLGTLLYHA | 1221 |
| WP_049474547 | 1159 | DPV---AFLE---RKGYRN--V-QEENIIK--LPKYSLFK---LENGRKRLLAS ARELQKGNEIVLPNHLGTLLYHA | 1221 |
| EMC03581 | 1152 | DPV---AFLE---RKGYRN--V-QEENIIK--LPKYSLFK---LENGRKRLLAS ARELQKGNEIVLPNHLGTLLYHA | 1214 |
| WP_000428612 | 1187 | SPI---AFLE---NKGYHN--V-RKENILC--LPKYSLFE---LKNGRRRMLAS AKELQKGNEIVLPVHLTTLLYHA | 1249 |
| WP_000428613 | 1185 | NPI---TFLE---NKGYHN--V-RKENILC--LPKYSLFE---LENGRRRLLAS AKELQKGNEIVLPVYLTTLLYHS | 1247 |
| WP_049523028 | 1180 | NPV---AFLE---GKGYQN--V-VEENIIR--LPKYSLFE---LENGRRRMLAS AKELQKGNEMVLPSYLIALLYHA | 1242 |
| WP_003107102 | 1146 | DRI---TFLE---KKGYQD--I-QESLIIK--LPKFSLFE---LENGRKRLLAS --ELQKGNELSLPNKYIQFLYLA | 1208 |
| WP_054279288 | 1179 | NPI---AFLE---SKGYHD--I-QEHLMIT--LPKYSLFE---LENGRRRLLAS --ELQKGNEMVLPQHLVTFLYRV | 1241 |
| WP_049531101 | 1189 | NPT---AYLE---EYGYKN--I-NPNLIIK--LPKYSLFK---FNDGQRRLLAS SIELQKGNELILPYHFTTLLYHA | 1251 |
| WP_049538452 | 1189 | NPI---AYLE---ECGYKN--I-NPNLIIK--LPKYSLFE---FNGGQRRLLAS SIELQKGNELILPYHFTALLYHT | 1251 |
| WP_049549711 | 1191 | NPI---AYLE---ECGYKN--I-NPNLIIK--LPKYSLFE---FNGGQRRLLAS SIELQKGNELILPYHFTALLYHA | 1253 |
| WP_007896501 | 1183 | DNI---AFLE---KKGYQD--I-QEKLLIK--LPKYSLFE---LENGRRRLLAS --EFQKGNELALSGKYMKFLYLA | 1245 |
| EFR44625 | 1135 | DNI---AFLE---KKGYQD--I-QEKLLIK--LPKYSLFE---LENGRRRLLAS --EFQKGNELALSGKYMKFLYLA | 1197 |
| WP_002897477 | 1184 | NPI---TFLE---NKGYHN--V-RKENILC--LPKYSLFE---LENGRRRLLAS AKELQKGNEIVLPVCLTTLLYHS | 1246 |
| WP_002906454 | 1190 | NPV---TYLE---ECGYKN--I-NSNLIIK--LPKYSLFE---FNDGQRRLLAS SIELQKGNELILPYHLTALLYHA | 1252 |
| WP_009729476 | 1185 | NPI---AFLE---NKGYHN--V-CKENILC--LPKYSLFE---LENGRRRLLAS AKELQKCNEIVLPVYLTTLLYHS | 1247 |
| CQR24647 | 1175 | NSV---TFLE---EKGYRN--I-RENTIIK--FPKYSLFE---LENGRRRLLAS AIELQKGNEMFLPQQFVNLLYHA | 1237 |
| WP_000066813 | 1189 | NPI---TFLE---NKGYHN--V-RKENILC--LPKYSLFE---LESGRRRMLAS AKELQKGNEIVLPVYLTTLLYHS | 1251 |
| WP_009754323 | 1185 | NPI---TFLE---NKGYHN--V-RKENILC--LPKYSLFE---LENGRRRLLAS AKELQKGNEIVLPVYLTTLLYHS | 1247 |
| WP_044674937 | 1178 | NPI---EFLE---HKGYKN--I-LEKNIIK--LPKYSLFE---LENGRRRLLAS AKELQKGNEMILPPHLVTLLYHS | 1240 |
| WP_044676715 | 1180 | NPI---EFLE---HKGYKN--I-LEKNIIK--LPKYSLFE---LENGRRRLLAS AKELQKGNEMILPPHLVTLLYHS | 1242 |
| WP_044680361 | 1180 | NPI---EFLE---HKGYKN--I-LEKNIIK--LPKYSLFE---LENGRRRLLAS AKELQKGNEMILPPHLVTLLYHS | 1242 |
| WP_044681799 | 1178 | NPI---EFLE---HKGYKN--I-LEKNIIK--LPKYSLFE---LENGRRRLLAS AKELQKGNEMILPPHLVTLLYHS | 1240 |
| WP_049533112 | 1186 | DKR---AFLL---GKGYKD--I-K--KIIE--LPKYSLFE---LKDGSRRMLAS RGEIHKGNELFVPQKFTTLLYHA | 1253 |
| WP_029090905 | 1118 | SETslgAYIA---EQIKSE--VeILN----grILKYQLIS----NNGNRLYIAG -SERHNARQLIVSDEAAKVIWLI | 1181 |
| WP_006506696 | 1150 | EKI---NYIE--eKEGLSD--VrIIK---Dn-IPVNQMIEm----DGGEYLLTS --EYVNARQLVLNEKQCALIADI | 1211 |
| AIT42264 | 1177 | NPI---DFLE---AKGYKE--V-KKDLIIK--LPKYSLFE---LENGRKRMLAS -GELQKGNELALPSKYVNFLYLA | 1239 |
| WP_034440723 | 1150 | QTT---EYLG---KIGFNK--AsIIN---S--FKNYTLFE---LENGSRRMIVG KGELQKGNQMYLPQNLLEFVYHL | 1217 |
| AKQ21048 | 1177 | NPI---DFLE---AKGYKE--V-KKDLIIK--LPKYSLFE---LENGRKRMLAS -GELQKGNELALPSKYVNFLYLA | 1239 |
| WP_004636532 | 1151 | HPT---AYLE---EAGYNN--P-TV--LHE--LFKYQLFE---LEDGSRRMIAS AKEFQKGNQMVLPLELVELLYHA | 1211 |
| WP_002364836 | 1157 | NPI---LFLE---EKGFLR--P-RV--LMK--LPKYTLYE---FPEGRRRLLAS AKEAQKGNQMVLPEHLLTLLYHA | 1217 |
| WP_016631044 | 1108 | NPI---LFLE---EKGFLR--P-RV--LMK--LPKYTLYE---FPEGRRRLLAS AKEAQKGNQMVLPEHLLTLLYHA | 1168 |
| EMS75795 | 893 | DPI---GFLS---NKGYSN--V-TKF--IK--LSKYTLYE---LENGRRRMVAS -KEAQKANSFILPEKLVTLLYHA | 953 |
| WP_002373311 | 1157 | NPI---LFLE---EKGFLR--P-RV--LMK--LPKYTLYE---FPEGRRRLLAS AKEAQKGNQMVLPEHLLTLLYHA | 1217 |
| WP_002378009 | 1157 | NPI---LFLE---EKGFLR--P-RV--LMK--LPKYTLYQ---FPEGRRRLLAS AKEAQKGNQMVLPEHLLTLLYHA | 1217 |
| WP_002407324 | 1157 | NPI---LFLE---EKGFLR--P-RV--LMK--LPKYTLYE---FPEGRRRLLAS AKEAQKGNQMVLPEHLLTLLYHA | 1217 |
| WP_002413717 | 1157 | NPI---LFLE---EKGFLR--P-RV--LMK--LPKYTLYE---FPEGRRRLLAS AKEAQKGNQMVLPEHLLTLLYHA | 1217 |
| WP_010775580 | 1159 | NPI---LFLE---EKGFLR--P-RV--LMK--LPKYTLYE---FPEGRRRLLAS AKEAQKGNQMVLPEHLLTLLYHA | 1219 |
| WP_010818269 | 1157 | NPI---LFLE---EKGFLR--P-RV--LMK--LPKYTLYE---FPEGRRRLLAS AKEAQKGNQMVLPEHLLTLLYHA | 1217 |
| WP_010824395 | 1157 | NPI---LFLE---EKGFLR--P-RV--LMK--LPKYTLYE---FPEGRRRLLAS AKEAQKGNQMVLPEHLLTLLYHA | 1217 |
| WP_016622645 | 1157 | NPI---LFLE---EKGFLR--P-RV--LMK--LPKYTLYE---FPEGRRRLLAS AKEAQKGNQMVLPEHLLTLLYHA | 1217 |
| WP_033624816 | 1157 | NPI---LFLE---EKGFLR--P-RV--LMK--LPKYTLYE---FPEGRRRLLAS AKEAQKGNQMVLPERLLTLLYHA | 1217 |
| WP_033625576 | 1157 | NPI---LFLE---EKGFLR--P-RV--LMK--LPKYTLYE---FPEGRRRLLAS AKEAQKGNQMVLPEHLLTLLYHA | 1217 |
| WP_033789179 | 1157 | NPI---LFLE---EKGFLR--P-RV--LMK--LPKYTLYE---FPEGRRRLLAS AKEAQKGNQMVLPEHLLTLLYHA | 1217 |
| WP_002310644 | 1159 | SPV---LFLK---NKGYEQ--A-EIE--MK--LPKYALFE---LENGRKRMVAS -KEAQKANSFLLPEHLVTLLYHA | 1219 |
| WP_002312694 | 1160 | SPV---LFLK---NKGYEQ--A-EIE--MK--LPKYALFE---LENGRKRMVAS -KEAQKANSFLLPEHLVTLLYHA | 1220 |
| WP_002314015 | 1160 | SPV---LFLK---NKGYEQ--A-EIE--MK--LPKYALFE---LENGRKRMVAS -KEAQKANSFLLPEHLVTLLYHA | 1220 |
| WP_002320716 | 1160 | SPV---LFLK---NKGYEQ--A-EIE--MK--LPKYALFE---LENGRKRMVAS -KEAQKANSFLLPEHLVTLLYHA | 1220 |
| WP_002330729 | 1159 | SPV---LFLK---NKGYEQ--A-EIE--MK--LPKYALFE---LENGRKRMVAS -KEAQKANSFLLPEHLVTLLYHA | 1219 |
| WP_002335161 | 1160 | SPV---LFLK---NKGYEQ--A-EIE--MK--LPKYALFE---LENGRKRMVAS -KEAQKANSFLLPEHLVTLLYHA | 1220 |
| WP_002345439 | 1160 | SPV---LFLK---NKGYEQ--A-EIE--MK--LPKYALFE---LENGRKRMVAS -KEAQKANSFLLPEHLVTLLYHA | 1220 |
| WP_034867970 | 1150 | DPT---TFLK---EKGFPQ--V-TEF--IK--LPKYTLFE---FDNGRRRFLAS -KESQKGNPFILSDQLVTLLYHA | 1210 |
| WP_047937432 | 1160 | SPV---LFLK---NKGYEQ--A-EIE--MK--LPKYALFE---LENGRKRMVAS -KEAQKANSFLLPEHLVTLLYHA | 1220 |
| WP_010720994 | 1150 | DPT---TFLK---DKGFPQ--V-TEF--IK--LPKYTLFE---FDNGRRRFLAS -KESQKGNPFILSDQLVTLLYHA | 1210 |
| WP_010737004 | 1150 | DPT---TFLK---EKGFPQ--V-TEF--IK--LPKYTLFE---FDNGRRRFLAS -KESQKGNPFILSDQLVTLLYHA | 1210 |
| WP_034700478 | 1150 | DPT---TFLK---DKGFPH--V-TEF--IK--LPKYTLFE---FDNGRRRFLAS -KESQKGNPFILSDQLVTLLYHA | 1210 |
| WP_007209003 | 1148 | NPIl---YLS---KKDYHN---pKVEAI----LPKYSLFE---FENGRRRMVAS -SETQKGNQLIIPGHLMELLYHS | 1208 |
| WP_023519017 | 1144 | DPR---EFLK---TKGYEG--V-KQW--LI--LPKYILFE---AQGGYRRMIAS -QETQKANSLILPENLVTLLYHA | 1204 |
| WP_010770040 | 1155 | DPV---SLLE---EKGYAN--P-EV--LIH--LPKYTLYE---LENGRRRLLAS ANEAQKGNQLVLPASLVTLLYHA | 1215 |
| WP_048604708 | 1152 | NER---EFLK---NKGYQN--P-QI--CMK--LPKYSLYE---FDDGRRRLLAS AKEAQKGNQMVLPAHLVTFLYHA | 1212 |
| WP_010750235 | 1153 | DPI---SFLI---EKGYSN--V-NQF--IK--LPKYTLFE---LANGQRRMLAS -QELQKANSFILPEKLVTLLYHA | 1213 |
| AII16583 | 1216 | NPI---DFLE---AKGYKE--V-KKDLIIK--LPKYSLFE---LENGRKRMLAS -GELQKGNELALPSKYVNFLYLA | 1278 |
| WP_029073316 | 1165 | TKI---NYIK--eSEGLEE--VkIIK---E--ILKNQLIEi----NGGLFYVTS --EIVNARQLILDFNCTRIIDGI | 1225 |
| WP_031589969 | 1165 | IKI---NYLK--qAEDLEE--VqIGK---E--ILKNQLIEk----DGGLYYIVA --EIINAKQLILNESQTKLVCEI | 1225 |
| KDA45870 | 1139 | DPT---AYLA---SRGYTNvtNsFIL-------PKYSLLEd---PEGRRRYLAS -KEFQKANELILPQHLVELLYWV | 1199 |
| WP_039099354 | 1171 | QKI-spQFTKv---KKQKGtiV-KVVEDFEv-IAPHILINqrfFDNGQELTLGS ----HNEQELILDKTAVKLLNGA | 1241 |
| AKP02966 | 1173 | KTL--qNWLE---ENVKHKksIqIIK---Nn-VPIGQIIY------SKKVGLLS -REIANRQQLILPPEHSALLRIL | 1237 |
| WP_010991369 | 1155 | DEK---AFLE---EQGYRQ--P-KV--LAK--LPKYTLYE---CEEGRRRMLAS ANEAQKGNQQVLPNHLVTLLHHA | 1215 |
| WP_033838504 | 1155 | DEK---AFLE---EQGYRQ--P-KV--LAK--LPKYTLYE---CEEGRRRMLAS ANEAQKGNQQVLPNHLVTLLHHV | 1215 |
| EHN60060 | 1158 | DEK---AFLE---EQGYRQ--P-KV--LAK--LPKYTLYE---CEEGRRRMLAS ANEAQKGNQQVLPNHLVTLLHHV | 1218 |
| EFR89594 | 924 | DEK---AFLE---EQGYRQ--P-KV--LAK--LPKYTLYE---CEEGRRRMLAS ANEAQKGNQQVLPNHLVTLLHHA | 984 |
| WP_038409211 | 1155 | DQK---AFLE---EKGYYS--P-KV--LTK--IPKYTLYE---CENGRRRMLGS ANEAQKGNQMVLPNHLMTLLYHA | 1215 |
| EFR95520 | 774 | DQK---AFLE---EKGYYS--P-KV--LTK--IPKYTLYE---CENGRRRMLGS ANEAQKGNQMVLPNHLMTLLYHA | 834 |
| WP_003723650 | 1155 | DEE---AFLE---EKGYRH--P-KV--LTK--LPKYTLYE---CEKGRRRMLAS ANEAQKGNQLVLSNHLVSLLYHA | 1215 |
| WP_003727705 | 1155 | DEE---AFLE---EKGYHQ--P-KV--LTK--LPKYTLYE---CEKGRRRMLSS ANEAQKGNQLVLSNHLVSLLYHA | 1215 |
| WP_003730785 | 1155 | DEE---AFLE---EKGYHQ--P-KV--LTK--LPKYTLYE---CEKGRRRMLSS ANEAQKGNQLVLSNHLVSLLYHA | 1215 |
| WP_003733029 | 1155 | DEK---TFLE---EKGYHQ--P-KV--LIK--VPKYTLYE---CKNGRRRMLGS ANEAHKGNQMLLPNHLMALLYHA | 1215 |
| WP_003739838 | 1155 | DEK---SFLE---KQGYRQ--P-KV--LTK--LPKYTLYE---CENGRRRMLAS ANEAQKGNQQVLKGQLITLLHHA | 1215 |
| WP_014601172 | 1155 | DEE---AFLE---EKGYRH--P-KV--LTK--LPKYTLYE---CEKGRRRMLAS ANEAQKGNQLVLSNHLVSLLYHA | 1215 |
| WP_023548323 | 1155 | DEK---VFLE---GKGYHQ--P-KV--LTK--LPKYALYE---CENGRRRMLGS ANEVHKGNQMLLPNHLMTLLYHA | 1215 |
| WP_031665337 | 1155 | DEE---AFLE---EKGYRH--P-KV--LTK--LPKYTLYE---CEKGRRRMLAS ANEAQKGNQLVLSNHLVSLLYHA | 1215 |
| WP_031669209 | 1155 | DEK---TFLE---EKGYHQ--P-KV--LIK--VPKYTLYE---CENGRRRMLGS ANEAHKGNQMLLPNHLMALLYHA | 1215 |
| WP_033920898 | 1155 | DEK---VFLE---GKGYHQ--P-KV--LTK--LPKYALYE---CENGRRRMLGS ANEVHKGNQMLLPNHLMTLLYHA | 1215 |
| AKI42028 | 1158 | DEE---AFLE---EKGYRH--P-KV--LTK--LPKYTLYE---CEKGRRRMLAS ANEAQKGNQLVLSNHLVSLLYHA | 1218 |
| AKI 50529 | 1158 | DEK---VFLE---GKGYHQ--P-KV--LTK--LPKYALYE---CENGRRRMLGS ANEVHKGNQMLLPNHLMTLLYHA | 1218 |
| EFR83390 | 603 | DEE---AFLE---EKGYRH--P-KV--LTK--LPKYTLYE---CEKGRRRMLAS ANEAQKGNQLVLSNHLVSLLYHA | 663 |
| WP_046323366 | 1155 | DQK---EFLE---GKGYRN--P-KV--ITK--IPKYTLYE---CENGRRRMLGS ANEAQKGNQMVLPNHLMTLLYHA | 1215 |
| AKE81011 | 1193 | NPI---DFLE---AKGYKE--V-KKDLIIK--LPKYSLFE---LENGRKRMLAS -GELQKGNELALPSKYVNFLYLA | 1255 |
| CUO82355 | 1154 | EQI---EYVE--kEEKLSD--VkIIK---Nn-IPLNQLIEi----DGRQYLLTS --ECVNAMQLVLNEEQCKLIADI | 1215 |
| WP_033162887 | 1155 | EQL---SYIAspeHEDLID--VrIVK---E--ILKNQLIEi----DGGLYYVTS --EYVTARQLSLNEQSCKLISEI | 1217 |
| AGZ01981 | 1210 | NPI---DFLE---AKGYKE--V-KKDLIIK--LPKYSLFE---LENGRKRMLAS -GELQKGNELALPSKYVNFLYLA | 1272 |
| AKA60242 | 1177 | NPI---DFLE---AKGYKE--V-KKDLIIK--LPKYSLFE---LENGRKRMLAS -GELQKGNELALPSKYVNFLYLA | 1239 |
| AKS40380 | 1177 | NPI---DFLE---AKGYKE--V-KKDLIIK--LPKYSLFE---LENGRKRMLAS -GELQKGNELALPSKYVNFLYLA | 1239 |
| 4UN5_B | 1181 | NPI---DFLE---AKGYKE--V-KKDLIIK--LPKYSLFE---LENGRKRMLAS -GELQKGNELALPSKYVNFLYLA | 1243 |
| WP_010922251 | 1240 | SHYEKLKgSPEDnEQKQL--FVEQHKHYLDEIIEQISEFSKRVILAD--ANLDKVL-S AYN-KH---RDKPIREq- | 1305 |
| WP_039695303 | 1249 | HRAD----NFNS-TEYLN--YVSEHKKEFEKVLSCVEDFANLYVDVE--KNLSKIR-A VAD-SM---DNFSIEE-- | 1308 |
| WP_045635197 | 1247 | KNVH----KLDE-PGHLE--YIQKHRNEFKDLLNLVSEFSQKYVLAD--ANLEKIK-S LYA-DN---EQADIEI-- | 1306 |
| 5AXW_A | 979 | GELYRVIgVNND1LNRIE---VNMIDITYREYLENMNDKRPPRIIKTiaSKTQSIK-K LYEyKSk--KHPQIIKkg | 1056 |
| WP_009880683 | 924 | SHYEKLKgSPEDnEQKQL--FVEQHKHYLDEIIEQISEFSKRVILAD--ANLDKVL-S AYN-KH---RDKPIREq- | 989 |
| WP_010922251 | 1240 | SHYEKLKgSPEDnEQKQL--FVEQHKHYLDEIIEQISEFSKRVILAD--ANLDKVL-S AYN-KH---RDKPIREq- | 1305 |
| WP_011054416 | 1240 | SHYEKLKgSPEDnEQKQL--FVEQHKHYLDEIIEQISEFSKRVILAD--ANLDKVL-S AYN-KH---RDKPIREq- | 1305 |
| WP_011284745 | 1240 | SHYEKLKgSPEDnEQKQL--FVEQHKHYLDEIIEQISEFSKRVILAD--ANLDKVL-S AYN-KH---RDKPIREq- | 1305 |
| WP_011285506 | 1240 | SHYEKLKgSPEDnEQKQL--FVEQHKHYLDEIIEQISEFSKRVILAD--ANLDKVL-S AYN-KH---RDKPIREq- | 1305 |
| WP_011527619 | 1240 | SHYEKLKgSPEDnEQKQL--FVEQHKHYLDEIIEQISEFSKRVILAD--ANLDKVL-S AYN-KH---RDKPIREq- | 1305 |
| WP_012560673 | 1240 | SHYEKLKgSPEDnEQKQL--FVEQHKHYLDEIIEQISEFSKRVILAD--ANLDKVL-S AYN-KH---RDKPIREq- | 1305 |
| WP_014407541 | 1239 | SHYEKLKgSPEDnEQKQL--FVEQHKHYLDEIIEQISEFSKRVILAD--ANLDKVL-S AYN-KH---RDKPIREq- | 1304 |
| WP_020905136 | 1240 | SHYEKLKgSPEDnEQKQL--FVEQHKHYLDEIIEQISEFSKRVILAD--ANLDKVL-S AYN-KH---RDKPIREq- | 1305 |
| WP_023080005 | 1239 | SHYEKLKgSPEDnEQKQL--FVEQHKHYLDEIIEQISEFSKRVILAD--ANLDKVL-S AYN-KH---RDKPIREq- | 1304 |
| WP_023610282 | 1239 | SHYEKLKgSPEDnEQKQL--FVEQHKHYLDEIIEQISEFSKRVILAD--ANLDKVL-S AYN-KH---RDKPIREq- | 1304 |
| WP_030125963 | 1240 | SHYEKLKgSPEDnEQKQL--FVEQHKHYLDEIIEQISEFSKRVILAD--ANLDKVL-S AYN-KH---RDKPIREq- | 1305 |
| WP_030126706 | 1240 | SHYEKLKgSPEDnEQKQL--FVEQHKHYLDEIIEQISEFSKRVILAD--ANLDKVL-S AYN-KH---RDKPIREq- | 1305 |
| WP_031488318 | 1240 | SHYEKLKgSPEDnEQKQL--FVEQHKHYLDEIIEQISEFSKRVILAD--ANLDKVL-S AYN-KH---RDKPIREq- | 1305 |
| WP_032460140 | 1240 | SHYEKLKgSPEDnEQKQL--FVEQHKHYLDEIIEQISEFSKRVILAD--ANLDKVL-S AYN-KH---RDKPIREq- | 1305 |
| WP_032461047 | 1240 | SHYEKLKgSPEDnEQKQL--FVEQHKHYLDEIIEQISEFSKRVILAD--ANLDKVL-S AYN-KH---RDKPIREq- | 1305 |
| WP_032462016 | 1240 | SHYEKLKgSPEDnEQKQL--FVEQHKHYLDEIIEQISEFSKRVILAD--ANLDKVL-S AYN-KH---RDKPIREq- | 1305 |
| WP_032462936 | 1240 | SHYEKLKgSPEDnEQKQL--FVEQHKHYLDEIIEQISEFSKRVILAD--ANLDKVL-S AYN-KH---RDKPIREq- | 1305 |
| WP_032464890 | 1240 | SHYEKLKgSPEDnEQKQL--FVEQHKHYLDEIIEQISEFSKRVILAD--ANLDKVL-S AYN-KH---RDKPIREq- | 1305 |
| WP_033888930 | 1065 | SHYEKLKgSPEDnEQKQL--FVEQHKHYLDEIIEQISEFSKRVILAD--ANLDKVL-S AYN-KH---RDKPIREq- | 1130 |
| WP_038431314 | 1240 | SHYEKLKgSPEDnEQKQL--FVEQHKHYLDEIIEQISEFSKRVILAD--ANLDKVL-S AYN-KH---RDKPIREq- | 1305 |
| WP_038432938 | 1239 | SHYEKLKgSPEDnEQKQL--FVEQHKHYLDEIIEQISEFSKRVILAD--ANLDKVL-S AYN-KH---RDKPIREq- | 1304 |
| WP_038434062 | 1240 | SHYEKLKgSPEDnEQKQL--FVEQHKHYLDEIIEQISEFSKRVILAD--ANLDKVL-S AYN-KH---RDKPIREq- | 1305 |
| BAQ51233 | 1151 | SHYEKLKgSPEDnEQKQL--FVEQHKHYLDEIIEQISEFSKRVILAD--ANLDKVL-S AYN-KH---RDKPIREq- | 1216 |
| KGE60162 | 415 | SHYEKLKgSPEDnEQKQL--FVEQHKHYLDEIIEQISEFSKRVILAD--ANLDKVL-S AYN-KH---RDKPIREq- | 480 |
| KGE60856 | 178 | SHYEKLKgSPEDnEQKQL--FVEQHKHYLDEIIEQISEFSKRVILAD--ANLDKVL-S AYN-KH---RDKPIREq- | 243 |
| WP_002989955 | 1240 | SHYEKLKgSPEDnEQKQL--FVEQHKHYLDEIIEQISEFSKRVILAD--ANLDKVL-S AYN-KH---RDKPIREq- | 1305 |
| WP_003030002 | 1222 | YQIE----KNYE-PEHRE--YVEKHKDEFKELLEYISVFSRKYVLAD--NNLTKIE-M LFS-KN---KDAEVSS-- | 1281 |
| WP_003065552 | 1250 | QRIN----SFNS-TKYLD--YVSAHKKEFEKVLSCVEDFANLYVDVE--KNLSKIR-A VAD-SM---DNFSIEE-- | 1309 |
| WP_001040076 | 1241 | SRYNESKgKPEEiEKKQE--FVNQHVSYFDDIFQIINDFSKRVILAD--ANLEKIN-R LYQ-DNk--ENIPVDE-- | 1306 |
| WP_001040078 | 1249 | SRYNESKgKPEEiEKKQE--FVNQHVSYFDDILQLINDFSKRVILAD--ANLEKIN-K LYQ-DNk--ENISVDE-- | 1314 |
| WP_001040080 | 1241 | SRYNESKgKPEEiEKKQE--FVNQHVSYFDDILQLINDFSKRVILAD--ANLEKIN-K LYQ-DNk--ENISVDE-- | 1306 |
| WP_001040081 | 1241 | SRYNESKgKPEEiEKKQE--FVNQHVSYFDDILQLINDFSKRVILAD--ANLEKIN-K LYQ-DNk--ENISVDE-- | 1306 |
| WP_001040083 | 1241 | SRYNESKgKPEEiEKKQE--FVNQHVSYFDDILQLINDFSKRVILAD--ANLEKIN-K LYQ-DNk--ENISVDE-- | 1306 |
| WP_001040085 | 1241 | SRYNESKgKPEEiEKKQE--FVNQHVSYFDDILQLINDFSKRVILAD--ANLEKIN-K LYQ-DNk--ENISVDE-- | 1306 |
| WP_001040087 | 1241 | SRYNESKgKPEEiEKKQE--FVNQHVSYFDDILQLINDFSKRVILAD--ANLEKIN-K LYQ-DNk--ENISVDE-- | 1306 |
| WP_001040088 | 1241 | SRYNESKgKPEEiEKKQE--FVNQHVSYFDDILQLINDFSKRVILAD--ANLEKIN-K LYQ-DNk--ENISVDE-- | 1306 |
| WP_001040089 | 1241 | SRYNESKgKPEEiEKKQE--FVNQHVSYFDDILQLINDFSKRVILAD--ANLEKIN-K LYQ-DNk--ENISVDE-- | 1306 |
| WP_001040090 | 1241 | SRYNESKgKPEEiEKKQE--FVNQHVSYFDDILQLINDFSKRVILAD--ANLEKIN-K LYQ-DNk--ENISVDE-- | 1306 |
| WP_001040091 | 1241 | SRYNESKgKPEEiEKKQE--FVNQHVSYFDDILQLINDFSKRVILAD--ANLEKIN-K LYQ-DNk--ENISVDE-- | 1306 |
| WP_001040092 | 1241 | SRYNESKgKPEEiEKKQE--FVNQHISYFDDILQLINDFSKRVILAD--ANLEKIN-K LYS-DNk--DNTPVDE-- | 1306 |
| WP_001040094 | 1241 | SRYNELKgKPEEiEQKQE--FVVQHVSYFDDILQIINDFSNRVILAD--ANLEKIN-K LYQ-DNk--ENIPVDE-- | 1306 |
| WP_001040095 | 1241 | SRYNELKgKPEEiEQKQE--FVVQHVSYFDDILQIINDFSNRVILAD--ANLEKIN-K LYQ-DNk--ENIPVDE-- | 1306 |
| WP_001040096 | 1241 | SRYNELKgKPEEiEQKQE--FVVQHVSYFDDILQIINDFSNRVILAD--ANLEKIN-K LYQ-DNk--ENIPVDE-- | 1306 |
| WP_001040097 | 1241 | SRYNELKgKPEEiEQKQE--FVVQHVSYFDDILQIINDFSNRVILAD--ANLEKIN-K LYQ-DNk--ENIPVDE-- | 1306 |
| WP_001040098 | 1241 | SRYNELKgKPEEiEQKQE--FVVQHVSYFDDILQIINDFSNRVILAD--ANLEKIN-K LYQ-DNk--ENIPVDE-- | 1306 |
| WP_001040099 | 1241 | SRYNELKgKPEEiEQKQE--FVVQHVSYFDDILQIINDFSNRVILAD--ANLEKIN-K LYQ-DNk--ENIPVDE-- | 1306 |
| WP_001040100 | 1241 | SRYNELKgKPEEiEQKQE--FVVQHVSYFDDILQIINDFSNRVILAD--ANLEKIN-K LYQ-DNk--ENIPVDE-- | 1306 |
| WP_001040104 | 1241 | SRYNESKgKPEEiEKKQE--FVNQHVSYFDDILQLINDFSKRVILAD--ANLEKIN-K LYQ-DNk--ENISVDE-- | 1306 |
| WP_001040105 | 1241 | SRYNESKgKPEEiEKKQE--FVNQHVSYFDDILQLINDFSKRVILAD--ANLEKIN-K LYQ-DNk--ENISVDE-- | 1306 |
| WP_001040106 | 1241 | SRYNELKgKPEEiEQKQE--FVVQHVSYFDDILQIINDFSNRVILAD--ANLEKIN-K LYQ-DNk--ENISVDE-- | 1306 |
| WP_001040107 | 1241 | SRYNELKgKPEEiEQKQE--FVVQHVSYFDDILQIINDFSNRVILAD--ANLEKIN-K LYQ-DNk--ENISVDE-- | 1306 |
| WP_001040108 | 1241 | SRYNELKgKPEEiEQKQE--FVVQHVSYFDDILQIINDFSNRVILAD--ANLEKIN-K LYQ-DNk--ENISVDE-- | 1306 |
| WP_001040109 | 1241 | SRYNELKgKPEEiEQKQE--FVVQHVSYFDDILQIINDFSNRVILAD--ANLEKIN-K LYQ-DNk--ENISVDE-- | 1306 |
| WP_001040110 | 1241 | SRYNELKgKPEEiEQKQE--FVVQHVSYFDDILQIINDFSNRVILAD--ANLEKIN-K LYQ-DNk--ENISVDE-- | 1306 |
| WP_015058523 | 1241 | SRYNESKgKPEEiEKKQE--FVNQHVSYFDDILQLINDFSKRVILAD--ANLEKIN-K LYS-DNk--DNTPVDE-- | 1306 |
| WP_017643650 | 1241 | SRYNELKgKPEEiEQKQE--FVVQHVSYFDDILQIINDFSNRVILAD--ANLEKIN-K LYQ-DNk--ENIPVDE-- | 1306 |
| WP_017647151 | 1241 | SRYNELKgKPEEiEQKQE--FVVQHVSYFDDILQIINDFSNRVILAD--ANLEKIN-K LYQ-DNk--ENISVDE-- | 1306 |
| WP_017648376 | 1241 | SRYNELKgKPEEiEQKQE--FVVQHVSYFDDILQIINDFSNRVILAD--ANLEKIN-K LYQ-DNk--ENISVDE-- | 1306 |
| WP_017649527 | 1241 | SRYNESKgKPEEiEKKQE--FVNQHVSYFDDILQLINDFSKRVILAD--ANLEKIN-K LYQ-DNk--ENISVDE-- | 1306 |
| WP_017771611 | 1241 | SRYNELKgKPEEiEQKQE--FVVQHVSYFDDILQIINDFSNRVILAD--ANLEKIN-K LYQ-DNk--ENISVDE-- | 1306 |
| WP_017771984 | 1241 | SRYNESKgKPEEiEKKQE--FVNQHVSYFDDILQLINDFSKRVILAD--ANLEKIN-K LYQ-DNk--ENISVDE-- | 1306 |
| CFQ25032 | 1241 | SRYNESKgKPEEiEKKQE--FVNQHVSYFDDILQLINDFSKRVILAD--ANLEKIN-K LYQ-DNk--ENISVDE-- | 1306 |
| CFV16040 | 1241 | SRYNESKgKPEEiEKKQE--FVNQHVSYFDDILQLINDFSKRVILAD--ANLEKIN-K LYQ-DNk--ENISVDE-- | 1306 |
| KLJ37842 | 1241 | SRYNESKgKPEEiEKKQE--FVNQHVSYFDDILQLINDFSKRVILAD--ANLEKIN-K LYQ-DNk--ENISVDE-- | 1306 |
| KLJ72361 | 1241 | SRYNESKgKPEEiEKKQE--FVNQHVSYFDDILQLINDFSKRVILAD--ANLEKIN-K LYQ-DNk--ENISVDE-- | 1306 |
| KLL20707 | 1255 | SRYNESKgKPEEiEKKQE--FVNQHVSYFDDILQLINDFSKRVILAD--ANLEKIN-K LYQ-DNk--ENISVDE-- | 1320 |
| KLL42645 | 1241 | SRYNELKgKPEEiEQKQE--FVVQHVSYFDDILQIINDFSNRVILAD--ANLEKIN-K LYQ-DNk--ENISVDE-- | 1306 |
| WP_047207273 | 1241 | SRYNESKgKPEEiEKKQE--FVNQHVSYFDDILQLINDFSKRVILAD--ANLEKIN-K LYQ-DNk--ENISVDE-- | 1306 |
| WP_047209694 | 1241 | SRYNELKgKPEEiEQKQE--FVVQHVSYFDDILQIINDFSNRVILAD--ANLEKIN-K LYQ-DNk--ENIPVDE-- | 1306 |
| WP_050198062 | 1241 | SRYNESKgKPEEiEKKQE--FVNQHVSYFDDILQLINDFSKRVILAD--ANLEKIN-K LYQ-DNk--ENISVDE-- | 1306 |
| WP_050201642 | 1241 | SRYNESKgKPEEiEKKQE--FVNQHVSYFDDILQLINDFSKRVILAD--ANLEKIN-K LYQ-DNk--ENISVDE-- | 1306 |
| WP_050204027 | 1241 | SRYNELKgKPEEiEQKQE--FVVQHVSYFDDILQIINDFSNRVILAD--ANLEKIN-K LYQ-DNk--ENISVDE-- | 1306 |
| WP_050881965 | 1241 | SRYNESKgKPEEiEKKQE--FVNQHVSYFDDILQLINDFSKRVILAD--ANLEKIN-K LYQ-DNk--ENISVDE-- | 1306 |
| WP_050886065 | 1241 | SRYNESKgKPEEiEKKQE--FVNQHVSYFDDILQLINDFSKRVILAD--ANLEKIN-K LYQ-DNk--ENISVDE-- | 1306 |
| AHN30376 | 1241 | SRYNESKgKPEEiEKKQE--FVNQHVSYFDDILQLINDFSKRVILAD--ANLEKIN-K LYS-DNk--DNTPVDE-- | 1306 |
| EAO78426 | 1241 | SRYNESKgKPEEiEKKQE--FVNQHVSYFDDILQLINDFSKRVILAD--ANLEKIN-K LYQ-DNk--ENISVDE-- | 1306 |
| CCW42055 | 1241 | SRYNESKgKPEEiEKKQE--FVNQHVSYFDDILQIINDFSNRVILAD--ANLEKIN-K LYQ-DNk--ENISVDE-- | 1306 |
| WP_003041502 | 1254 | KRIN----NPIN-KDHIE--YVKKHRDDFKELLNYVLEFNEKYVGAT--KNGERLK-E AVA-DF---DSKSNEE-- | 1313 |
| WP_037593752 | 1223 | YQIE----KNYE-PEHRE--YVEKHKDEFKELLEYISVFSRKYVLAD--NNLTKIE-M LFS-KN---KDAEVSS-- | 1282 |
| WP_049516684 | 1223 | YRIE----KDYE-PEHRE--YVEKHKDEFKELLEYISVFSRKYVLAD--NNLTKIE-M LFS-KN---KDAEVSS-- | 1282 |
| GAD46167 | 1222 | YQIE----KNYE-PEHRE--YVEKHKDEFKELLEYISVFSRKYVLAD--NNLTKIE-M LFS-KN---KDAEVSS-- | 1281 |
| WP_018363470 | 1254 | HRIG----NFNS-AEHLK--YVSEHKKEFEEVLSCVENFANVYVDVE--KNLSKIR-A AAD-SM---DNFSIEE-- | 1313 |
| WP_003043819 | 1249 | QNISATIgSNNLg-------YIEQHREEFKEIFEKIIDFSEKYILKN--KVNSNLK-S SFD-EQfavSDSIL--l- | 1310 |
| WP_006269658 | 1222 | YRIE----KDYE-PEHRE--YVEKHKDEFKELLEYISVFSRKYVLAD--NNLTKIE-M LFS-KN---KDAEVSS-- | 1281 |
| WP_048800889 | 1242 | HRID----NSDN-SEHLK--YITEHKEEFGKLLSYIENFAKSYVDVD--KNLEKIQ-L AVE-KI---DSFSVKE-- | 1301 |
| WP_012767106 | 1246 | -HAHKIEsSKE--LEHEA--YILDHYNDLYQLLSYIERFASLYVDVE--KNISKVK-E LFS-NI---ESYSISEi- | 1308 |
| WP_014612333 | 1246 | -HAHKIEsSKE--LEHEA--YILDHYNDLYQLLSYIERFASLYVDVE--KNISKVK-E LFS-NI---ESYSISEi- | 1308 |
| WP_015017095 | 1246 | -HAHKIEsSKE--LEHEA--YILDHYNDLYQLLSYIERFASLYVDVE--KNISKVK-E LFS-NI---ESYSISEi- | 1308 |
| WP_015057649 | 1246 | -HAHKIEsSKE--LEHEA--YILDHYNDLYQLLSYIERFASLYVDVE--KNISKVK-E LFS-NI---ESYSISEi- | 1308 |
| WP_048327215 | 1246 | -HAHKIEsSKE--LEHEA--YILDHYNDLYQLLSYIERFASLYVDVE--KNISKVK-E LFS-NI---ESYSISEi- | 1308 |
| WP_049519324 | 1246 | -HAHKIEsSKE--LEHEA--YILDHYNDLYQLLSYIERFASLYVDVE--KNISKVK-E LFS-NI---ESYSISEi- | 1308 |
| WP_012515931 | 1220 | AHYHELIgSSEDvLRKKY--FVDRHLHYFDDIIQMINDFAERHILAS--SNLEKIN-H TYH-NN---SDLPVNEr- | 1285 |
| WP_021320964 | 1220 | AHYHELIgSSEDvLRKKY--FVERHLHYFDDIIQMINDFAERHILAS--SNLEKIN-H TYH-NN---SDLPINEr- | 1285 |
| WP_037581760 | 1220 | AHYHELIgSSEDvLRKKY--FVERHLHYFDDIIQMINDFAERHILAS--SNLEKIN-H TYH-NN---SDLPVNEr- | 1285 |
| WP_004232481 | 1252 | QHVN----NSHK-PEHLN--YVKQHKDEFKDIFNLIISIARINILKP--KVVDNL--- -IN-EF---TEYGQED-- | 1308 |
| WP_009854540 | 1247 | HRAD----NFNS-TEYLN--YVSEHKKEFEKVLSCVEDFANLYVDVE--KNLSKIR-A VAD-SM---DNFSIEE-- | 1306 |
| WP_012962174 | 1248 | HRVN----SFNN-SEHLK--YVSEHKKEFGEVLSCVENFAKSYVDVE--KNLGKIR-A VAD-KI---DTFSIED-- | 1307 |
| WP_039695303 | 1249 | HRAD----NFNS-TEYLN--YVSEHKKEFEKVLSCVEDFANLYVDVE--KNLSKIR-A VAD-SM---DNFSIEE-- | 1308 |
| WP_014334983 | 1252 | HRID----SFNS-TEHLK--YVSEHKKEFEKVLSCVENFSNLYVDVE--KNLSKVR-A AAE-SM---TNFSLEE-- | 1311 |
| WP_003099269 | 1240 | SHYTKFIgKEEDrEKKRS--YVESHLYYFDEIMQIIVEYSNRYILAD--SNLIKIQ-N LYK-EKd---NFSIEEq- | 1305 |
| AHY15608 | 1240 | SHYTKFTgKEEDrEKKRS--YVESHLYYFXEVKSSF---------------------- ------------------ | 1273 |
| AHY17476 | 1240 | SHYTKFTgKEEDrEKKRS--YVESHLYXFX---------------------------- ------------------ | 1267 |
| ESR09100 | 72 | SHYTKFIgKEEDrEKKRS--YVESHLYYFDEIMQIIVEYSNRYILAD--SNLIKIQ-N LYK--Ek--DNFSIEEq- | 137 |
| AGM98575 | 1240 | SHYTKFTgKEEDrEKKRS--YVESHLYYFDVRLSQVFRVTNVEF-------------- ------------------ | 1281 |
| ALF27331 | 1222 | KNIH----KVDE-PKHLD--YVKKHKDEFKELLDVVSNFSKKNILAE--SNLEKIE-E LYA-QN---NNKDITE-- | 1281 |
| WP_018372492 | 1229 | KKVDVLVkSKDD---DYD---LEEHRAEFAELLDCIKKFNDMYILAS--SNMSKIE-E IYQ-KNi---DAPIEE-- | 1289 |
| WP_045618028 | 1252 | QRIN----KISE-PIHKQ--YVETHQSEFKELLTAIISLSKKYI-QK--PNVESL--- LQQ-AF---DQSDKDIyq | 1310 |
| WP_045635197 | 1247 | KNVH----KLDE-PGHLE--YIQKHRNEFKDLLNLVSEFSQKYVLAD--ANLEKIK-S LYA-DN---EQADIEI-- | 1306 |
| WP_002263549 | 1222 | KNIH----KVDE-PKHLD--YVDKHKDEFKELLDVVSNFSKKYTLAE--GNLEKIK-E LYA-QN---NGEDLKE-- | 1281 |
| WP_002263887 | 1222 | KNIH----KVDE-PKHLD--YVDKHKDEFKELLDVVSNFSKKYTLAE--GNLEKIK-E LYA-QN---NGEDLKE-- | 1281 |
| WP_002264920 | 1222 | KNIH----KVDE-PKHLD--YVDKHKDEFKELLDVVSNFSKKYTLAE--GNLEKIK-E LYA-QN---NGEDLKE-- | 1281 |
| WP_002269043 | 1222 | KNIH----KVDE-PKHLD--YVDKHKDEFKELLDVVSNFSKKYTLAE--GNLEKIK-E LYA-QN---NGEDLKE-- | 1281 |
| WP_002269448 | 1222 | KNIH----KVDE-PKHLD--YVDKHKDEFKELLDVVSNFSKKYTLAE--GNLEKIK-E LYA-QN---NGEDLKE-- | 1281 |
| WP_002271977 | 1222 | KNIH----KVDE-PKHLD--YVDKHKDEFKELLDVVSNFSKKYTLAE--GNLEKIK-E LYA-QN---NGEDLKE-- | 1281 |
| WP_002272766 | 1222 | KNIH----KVDE-PKHLD--YVDKHKDEFKELLDVVSNFSKKYTLAE--GNLEKIK-E LYA-QN---NGEDLKE-- | 1281 |
| WP_002273241 | 1222 | KNIH----KVDE-PKHLD--YVDKHKDEFKELLDVVSNFSKKYTLAE--GNLEKIK-E LYA-QN---NGEDLKE-- | 1281 |
| WP_002275430 | 1222 | KNIH----KVDE-PKHLD--YVDKHKDEFKELLDVVSNFSKKYTLAE--GNLEKIK-E LYA-QN---NGEDLKE-- | 1281 |
| WP_002276448 | 1222 | KNIH----KVDE-PKHLD--YVDKHKDEFKELLDVVSNFSKKYTLAE--GNLEKIK-E LYA-QN---NGEDLKE-- | 1281 |
| WP_002277050 | 1230 | HHL-------DN-DYSNE--YVKNHYQQFDILFNEITSFSKKCKLGK--EHIQKIE-E AYSkER---DSASIEE-- | 1287 |
| WP_002277364 | 1222 | KNIH----KVDE-PKHLD--YVDKHKDEFKELLDVVSNFSKKYTLAE--GNLEKIK-E LYA-QN---NGEDLKE-- | 1281 |
| WP_002279025 | 1222 | KNIH----KVDE-PKHLD--YVDKHKDEFKELLDVVSNFSKKYTLAE--GNLEKIK-E LYA-QN---NGEDLKE-- | 1281 |
| WP_002279859 | 1222 | KNIH----KVDE-PKHLD--YVDKHKDEFKELLDVVSNFSKKYTLAE--GNLEKIK-E LYA-QN---NGEDLKE-- | 1281 |
| WP_002280230 | 1222 | KNIH----KVDE-PKHLD--YVDKHKDEFKELLDVVSNFSKKYTLAE--GNLEKIK-E LYA-QN---NGEDLKE-- | 1281 |
| WP_002281696 | 1222 | KNIH----KVDE-PKHLD--YVDKHKDEFKELLDVVSNFSKKYTLAE--GNLEKIK-E LYA-QN---NGEDLKE-- | 1281 |
| WP_002282247 | 1230 | HHL-------DN-DYSNE--YVKNHYQQFDILFNEITSFSKKCKLGK--EHIQKIE-E AYSkER---DFASIEE-- | 1287 |
| WP_002282906 | 1222 | KNIH----KVDE-PKHLD--YVDKHKDEFKELLDVVSNFSKKYTLAE--GNLEKIK-E LYA-QN---NGEDLKE-- | 1281 |
| WP_002283846 | 1222 | KNIH----KVDE-PKHLD--YVDKHKDEFKELLDVVSNFSKKYTLAE--GNLEKIK-E LYA-QN---NGEDLKE-- | 1281 |
| WP_002287255 | 1222 | KNIH----KVDE-PKHLD--YVDKHKDEFKELLDVVSNFSKKYTLAE--GNLEKIK-E LYA-QN---NGEDLKE-- | 1281 |
| WP_002288990 | 1222 | KNIH----KVDE-PKHLD--YVDKHKDEFKELLDVVSNFSKKYTLAE--GNLEKIK-E LYA-QN---NGEDLKE-- | 1281 |
| WP_002289641 | 1222 | KNIH----KVDE-PKHLD--YVDKHKDEFKELLDVVSNFSKKYTLAE--GNLEKIK-E LYA-QN---NGEDLKE-- | 1281 |
| WP_002290427 | 1222 | KNIH----KVDE-PKHLD--YVDKHKDEFKELLDVVSNFSKKYTLAE--GNLEKIK-E LYA-QN---NGEDLKE-- | 1281 |
| WP_002295753 | 1222 | KNIH----KVDE-PKHLD--YVDKHKDEFKELLDVVSNFSKKYTLAE--GNLEKIK-E LYA-QN---NGEDLKE-- | 1281 |
| WP_002296423 | 1222 | KNIH----KVDE-PKHLD--YVDKHKDEFKELLDVVSNFSKKYTLAE--GNLEKIK-E LYA-QN---NGEDLKE-- | 1281 |
| WP_002304487 | 1236 | KNIH----KVDE-PKHLD--YVDKHKDEFKELLDVVSNFSKKYTLAE--GNLEKIK-E LYA-QN---NGEDLKE-- | 1295 |
| WP_002305844 | 1222 | KNIH----KVDE-PKHLD--YVDKHKDEFKELLDVVSNFSKKYTLAE--GNLEKIK-E LYA-QN---NGEDLKE-- | 1281 |
| WP_002307203 | 1222 | KNIH----KVDE-PKHLD--YVDKHKDEFKELLDVVSNFSKKYTLAE--GNLEKIK-E LYA-QN---NGEDLKE-- | 1281 |
| WP_002310390 | 1222 | KNIH----KVDE-PKHLD--YVDKHKDEFKELLDVVSNFSKKYTLAE--GNLEKIK-E LYA-QN---NGEDLKE-- | 1281 |
| WP_002352408 | 1222 | KNIH----KVDE-PKHLD--YVDKHKDEFKELLDVVSNFSKKYTLAE--GNLEKIK-E LYA-QN---NGEDLKE-- | 1281 |
| WP_012997688 | 1222 | KNIH----KVDE-PKHLD--YVDKHKDEFKELLDVVSNFSKKYTLAE--GNLEKIK-E LYA-QN---NGEDLKE-- | 1281 |
| WP_014677909 | 1222 | KNIH----KVDE-PKHLD--YVDKHKDEFKELLDVVSNFSKKYTLAE--GNLEKIK-E LYA-QN---NGEDLKE-- | 1281 |
| WP_019312892 | 1222 | KNIH----KVDE-PKHLD--YVDKHKDEFKELLDVVSNFSKKYTLAE--GNLEKIK-E LYA-QN---NGEDLKE-- | 1281 |
| WP_019313659 | 1222 | KNIH----KVDE-PKHLD--YVDKHKDEFKELLDVVSNFSKKYTLAE--GNLEKIK-E LYA-QN---NGEDLKE-- | 1281 |
| WP_019314093 | 1222 | KNIH----KVDE-PKHLD--YVDKHKDEFKELLDVVSNFSKKYTLAE--GNLEKIK-E LYA-QN---NGEDLKE-- | 1281 |
| WP_019315370 | 1222 | KNIH----KVDE-PKHLD--YVDKHKDEFKELLDVVSNFSKKYTLAE--GNLEKIK-E LYA-QN---NGEDLKE-- | 1281 |
| WP_019803776 | 1222 | KNIH----KVDE-PKHLD--YVDKHKDEFKELLDVVSNFSKKYTLAE--GNLEKIK-E LYA-QN---NGEDLKE-- | 1281 |
| WP_019805234 | 1222 | KNIH----KVDE-PKHLD--YVDKHKDEFKELLDVVSNFSKKYTLAE--GNLEKIK-E LYA-QN---NGEDLKE-- | 1281 |
| WP_024783594 | 1222 | KNIH----KVDE-PKHLD--YVDKHKDEFKELLDVVSNFSKKYTLAE--GNLEKIK-E LYA-QN---NGEDLKE-- | 1281 |
| WP_024784288 | 1230 | HHL-------DN-DYSNE--YVKNHYQQFDILFNEITSFSKKCKLGK--EHIQKIE-E AYSkER---DFASIEE-- | 1287 |
| WP_024784666 | 1222 | KNIH----KVDE-PKHLD--YVDKHKDEFKELLDVVSNFSKKYTLAE--GNLEKIK-E LYA-QN---NGEDLKE-- | 1281 |
| WP_024784894 | 1222 | KNIH----KVDE-PKHLD--YVDKHKDEFKELLDVVSNFSKKYTLAE--GNLEKIK-E LYA-QN---NGEDLKE-- | 1281 |
| WP_024786433 | 1230 | HHL-------DN-DYSNE--YVKNHYQQFDILFNEITSFSKKCKLGK--EHIQKIE-E AYSkER---DSASIEE-- | 1287 |
| WP_049473442 | 1222 | KNIH----KVDE-PKHLD--YVDKHKDEFKELLDVVSNFSKKYTLAE--GNLEKIK-E LYA-QN---NGEDLKE-- | 1281 |
| WP_049474547 | 1222 | KNIH----KVDE-PKHLD--YVDKHKDEFKELLDVVSNFSKKYTLAE--GNLEKIK-E LYA-QN---NGEDLKE-- | 1281 |
| EMC03581 | 1215 | KNIH----KVDE-PKHLD--YVDKHKDEFKELLDVVSNFSKKYTLAE--GNLEKIK-E LYA-QN---NGEDLKE-- | 1274 |
| WP_000428612 | 1250 | KNIH----RLDE-PEHLE--YIQKHRNEFKGLLNLVSEFSQKYVLAD--ANLEKIK-N LYA-DN---EQADIEI-- | 1309 |
| WP_000428613 | 1248 | KNVH----KLDE-PEHLE--YIQKHRNEFKDLLNLVSEFSQKYVLAD--ANLEKIQ-N LYA-DN---EQADIEI-- | 1307 |
| WP_049523028 | 1243 | KRIQ----KKDE-PEHLE--YIKQHHSEFNDLLNFVSEFSQKYVLAE--SNLEKIK-N LYI-DN---EQTNMEE-- | 1302 |
| WP_003107102 | 1209 | SRYTSFSgKEEDrEKHRH--FVESHLHYFDEIKDIIADFSRRYILAD--ANLEKIL-T LYN-EKn---QFSIEEg- | 1274 |
| WP_054279288 | 1242 | SKRDK--gTQSEnME-----YISNHKEKFIEIFHYIIRYAEKNVIKP--KVIERLN-D TFNqKF---NDSDLTEl- | 1303 |
| WP_049531101 | 1252 | QRIN----KISE-PIHKQ--YVETHQSEFEELLTTIISLSKKYI-QK--PIVESL--- LQQ-AF---EQADKDIyg | 1310 |
| WP_049538452 | 1252 | QRIN----KISE-PIHKQ--YVEAHQNEFKELLTTIISLSKKYI-QK--PNVESL--- LQQ-AF---EQADKDIyg | 1310 |
| WP_049549711 | 1254 | QRIN----KFSE-PIHKQ--YVEAHQNEFKELLTIIISLSKKYI-QK--PNVESL--- LHQ-AF---EQADNDIyg | 1312 |
| WP_007896501 | 1246 | SRYDKLSsKIESeQQKKL--FVEQHLHYFDEILDIVVKHATCYIKAE--NNLKKII-S LYK-KK---EAYSINEg- | 1311 |
| EFR44625 | 1198 | SRYDKLSsKIESeQQKKL--FVEQHLHYFDEILDIVVKHATCYIKAE--NNLKKII-S LYK-KK---EAYSINEg- | 1263 |
| WP_002897477 | 1247 | KNLH----KLDE-PEHLE--YIQKHRNEFKDLLNLVSEFSQKYILAE--ANLEKIK-D LYA-DN---EQADIEI-- | 1306 |
| WP_002906454 | 1253 | QRIN----KISE-PIHKQ--YVEAHQNEFKELLTTIISLSKKYI-QK--PNVELL--- LQQ-AF---DQADKDIyg | 1311 |
| WP_009729476 | 1248 | KNVH----KLDE-PGHLE--YIQKHRNEFKDLLNLVSEFSQKYVLAD--ANLEKIK-N LYA-DN---EQADIEI-- | 1307 |
| CQR24647 | 1238 | QHAN----KEDS----VI--YLEKHRHELSELFHHIIGVSEKTILKP--KVEMTLN-E AFE-KHf--EFDEVSE-- | 1295 |
| WP_000066813 | 1252 | KNVH----KLDE-PEHLE--YIQKHRYEFKDLLNLVSEFSQKYVLAD--ANLEKIK-N LYA-DN---EQADIEI-- | 1311 |
| WP_009754323 | 1248 | KNVH----KLDE-PEHLE--YIQKHRYEFKDLLNLVSEFSQKYVLAE--ANLEKIK-S LYV-DN---EQADIEI-- | 1307 |
| WP_044674937 | 1241 | SNIH----KITE-PIHLN--YVNKNKHEFKELLRHISDFSTRYILAQ--DRLSKIE-E LYD-KN---DGDDISD-- | 1300 |
| WP_044676715 | 1243 | SNIH----KITE-PIHLN--YVNKNKHEFKELLRHISDFSTRYILAQ--DRLSKIE-E LYD-KN---DGDDISD-- | 1302 |
| WP_044680361 | 1243 | SNIH----KITE-PIHLN--YVNKNKHEFKELLRHISDFSTRYILAQ--DRLSKIE-E LYD-KN---DGDDISD-- | 1302 |
| WP_044681799 | 1241 | SNIH----KITE-PIHLN--YVNKNKHEFKELLRHISDFSTRYILAQ--DRLSKIE-E LYD-KN---DGDDISD-- | 1300 |
| WP_049533112 | 1254 | KRIN----NPIN-KDHIE--YVKKHRDDFKELLNYVLEFNEKYVGAT--KNGERLK-E AVA-DF---DSKSNEE-- | 1313 |
| WP_029090905 | 1182 | STKQA-----DE-AMFLKyyRLEHLEAVFEEL---IRKQAADYQIFE--KLIKKIEvN FYS----c----TYNEk- | 1240 |
| WP_006506696 | 1212 | YNAIYKQ-DYDNlDDILMi-----------QLYIELTNKMKVLYPAY-rGIAEKFE-S YVV----i----SKEEk- | 1268 |
| AIT42264 | 1240 | SHYEKLKgSPEDnEQKQL--FVEQHKHYLDEIIEQISEFSKRVILAD--ANLDKVL-S AYN-KH---RDKPIREg- | 1305 |
| WP_034440723 | 1218 | KHYNE-----DE--TSHK--FIVEHKAYFDELLNYIVEFANKYLELE--NSIEKIK-D LYH-----gKGPDVEEke | 1276 |
| AKQ21048 | 1240 | SHYEKLKgSPEDnEQKQL--FVEQHKHYLDEIIEQISEFSKRVILAD--ANLDKVL-S AYN-KH---RDKPIREg- | 1305 |
| WP_004636532 | 1212 | NRYDKVK-----fPDSIE--YVHDNLAKFDDLLEYVIDFSNKYINAD--KNVQKIQ-K IYK-EH---GTEDVEL-- | 1271 |
| WP_002364836 | 1218 | KQCLL----PNQ-SESLA--YVEQHQPEFQEILERVVDFAEVHTLAK--SKVQQIV-K LFE-AN---QTADVKE-- | 1277 |
| WP_016631044 | 1169 | KQCLL----PNQ-SESLA--YVEQHQPEFQEILERVVDFAEVHTLAK--SKVQQIV-K LFE-AN---QTADVKE-- | 1228 |
| EMS75795 | 954 | QHYDEIAhKESF-----D--YVNDHLSEFREILDQVIDFSNRYTIAA--KNTEKIA-E LFE-QN---QESTVQS-- | 1013 |
| WP_002373311 | 1218 | KQCLL----PNQ-SESLA--YVEQHQPEFQEILERVVDFAEVHTLAK--SKVQQIV-K LFE-AN---QTADVKE-- | 1277 |
| WP_002378009 | 1218 | KQCLL----PNQ-SESLA--YVEQHQPEFQEILERVVDFAEVHTLAK--SKVQQIV-K LFE-AN---QTADVKE-- | 1277 |
| WP_002407324 | 1218 | KQCLL----PNQ-SESLA--YVEQHQPEFQEILERVVDFAEVHTLAK--SKVQQIV-K LFE-AN---QTADVKE-- | 1277 |
| WP_002413717 | 1218 | KQCLL----PNQ-SESLA--YVEQHQPEFQEILERVVDFAEVHTLAK--SKVQQIV-K LFE-AN---QTADVKE-- | 1277 |
| WP_010775580 | 1220 | KQCLL----PNQ-SESLA--YVEQHQPEFQEILERVVDFAEVHTLAK--SKVQQIV-K LFE-AN---QTADVKE-- | 1279 |
| WP_010818269 | 1218 | KQCLL----PNQ-SESLA--YVEQHQPEFQEILERVVDFAEVHTLAK--SKVQQIV-K LFE-AN---QTADVKE-- | 1277 |
| WP_010824395 | 1218 | KQCLL----PNQ-SESLA--YVEQHQPEFQEILERVVDFAEVHTLAK--SKVQQIV-K LFE-AN---QTADVKE-- | 1277 |
| WP_016622645 | 1218 | KQCLL----PNQ-SESLA--YVEQHQPEFQEILERVVDFAEVHTLAK--SKVQQIV-K LFE-AN---QTADVKE-- | 1277 |
| WP_033624816 | 1218 | KQCLL----PNQ-SESLA--YVEQHQPEFQEILERVVDFAEVHTLAK--SKVQQIV-K LFE-AN---QTADVKE-- | 1277 |
| WP_033625576 | 1218 | KQCLL----PNQ-SESLA--YVEQHQPEFQEILERVVDFAEVHTLAK--SKVQQIV-K LFE-TN---QTADVKE-- | 1277 |
| WP_033789179 | 1218 | KQCLL----PNQ-SESLA--YVEQHQPEFQEILERVVDFAEVHTLAK--SKVQQIV-K LFE-AN---QTADVKE-- | 1277 |
| WP_002310644 | 1220 | KQYDEIShKESF-----D--YVNEHHKEFSEVFARVLEFAGKYTLAE--KNIEKLE-K IYK-EN---QTDDLAK-- | 1279 |
| WP_002312694 | 1221 | KQYDEIShKESF-----D--YVNEHHKEFSEVFARVLEFAGKYTLAE--KNIEKLE-K IYK-EN---QTDDLAK-- | 1280 |
| WP_002314015 | 1221 | KQYDEIShKESF-----D--YVNEHHKEFSEVFARVLEFAGKYTLAE--KNIEKLE-K IYK-EN---QTDDLAK-- | 1280 |
| WP_002320716 | 1221 | KQYDEIShKESF-----D--YVNEHHKEFSEVFARVLEFAGKYTLAE--KNIEKLE-K IYK-EN---QTDDLAK-- | 1280 |
| WP_002330729 | 1220 | KQYDEIShKESF-----D--YVNEHHKEFSEVFARVLEFAGKYTLAE--KNIEKLE-K IYK-EN---QTDDLAK-- | 1279 |
| WP_002335161 | 1221 | KQYDEIShKESF-----D--YVNEHHKEFSEVFARVLEFAGKYTLAE--KNIEKLE-K IYK-EN---QTDDLAK-- | 1280 |
| WP_002345439 | 1221 | KQYDEIShKESF-----D--YVNEHHKEFSEVFARVLEFAGKYTLAE--KNIEKLE-K IYK-EN---QTDDLAK-- | 1280 |
| WP_034867970 | 1211 | QHYDKITyQESF-----D--YVNTHLSDFSAILTEVLAFAEKYTLAD--KNIERIQ-E LYE-EN---KYGETSM-- | 1270 |
| WP_047937432 | 1221 | KQYDEIShKESF-----D--YVNEHHKEFSEVFARVLEFAGKYTLAE--KNIEKLE-K IYK-EN---QTDDLAK-- | 1280 |
| WP_010720994 | 1211 | QHYDKITyQESF-----D--YVNTHLSDFSAILTEVLAFAEKYTLAD--KNIERIQ-E LYE-EN---KYGEISM-- | 1270 |
| WP_010737004 | 1211 | QHYDKITyQESF-----D--YVNTHLSDFSAILTEVLAFAEKYTLAD--KNIERIQ-E LYE-EN---KYGETSM-- | 1270 |
| WP_034700478 | 1211 | QHYDKITyQESF-----D--YVNTHLSDFSAILTEVLAFAEKYTLAD--KNIERIQ-E LYE-EN---KYGEISM-- | 1270 |
| WP_007209003 | 1209 | KKIIN--gKNSD---SVS--YIQNNKEKFREIFEYIVDFSSKYISAD--ANLNKIE-K IFE-NNfh----KASEge | 1269 |
| WP_023519017 | 1205 | RHYDEINhKVSF-----D--YVNAHKEGFNDIFDFISDFGVRYILAP--QHLEKIK-V AYE-KN---KEVDLKE-- | 1264 |
| WP_010770040 | 1216 | KQVDE-----DS-GKSEE--YVREHRAEFAEILNYVQAFSETKILAN--KNLQTIL-K LYE-EN---KEADIKE-- | 1274 |
| WP_048604708 | 1213 | KHCNE-----KP-D-SLK--YVTEHQSGFSEIMAHVKDFAEKYTLVD--KNLEKIL-S LYA-KN---MDSEVKE-- | 1270 |
| WP_010750235 | 1214 | NHYDEIAyKDSY-----D--YVNEHFSNFQDILDKVIIFAEKYTSAP--QKLNQII-A TYE-KN---QEADRKI-- | 1273 |
| AII16583 | 1279 | SHYEKLKgSPEDnEQKQL--FVEQHKHYLDEIIEQISEFSKRVILAD--ANLDKVL-S AYN-KH---RDKPIREg- | 1344 |
| WP_029073316 | 1226 | YKAMKYK-NYSElSQEEIm-----------NVYDIFVEKLKLYYPTY-kNIAINFE-N FEN----i----SDEEk- | 1282 |
| WP_031589969 | 1226 | YKAMKYK-NYDNlDSEKIi-----------DLYRLLINKMELYYPEYrkQLVKKFE-D LKV----i----SIEEk- | 1283 |
| KDA45870 | 1200 | NAKDG--------EQKLE-----DHKAEFKELFDKIMEFADKYVVAP--KNSEKIR-R LYE-ENg-----DATPme | 1253 |
| WP_039099354 | 1242 | LPLTQ-----SEeLAEQV----------YDEILDQVMHYFPLYDINQfrAKLSAGKaA DGN-KMv-----QVGQgv | 1306 |
| AKP02966 | 1238 | QIPDE------DpDQILAf----YDKNILVEILQELITKMKKFYPFY--KNEQEFLaS FNQ--------ATTSEk- | 1296 |
| WP_010991369 | 1216 | ANCEV-----SD-GKSLD--YIESNREMFAELLAHVSEFAKRYTLAE--ANLNKIN-Q LFE-QN---KEGDIKA-- | 1274 |
| WP_033838504 | 1216 | ANCEV-----SD-GKSLD--YIESNREMFAELLAHVSEFAKRYTLAE--ANLNKIN-Q LFE-QN---KEGDIKA-- | 1274 |
| EHN60060 | 1219 | ANCEV-----SD-GKSLD--YIESNREMFAELLAHVSEFAKRYTLAE--ANLNKIN-Q LFE-QN---KEGDIKA-- | 1277 |
| EFR89594 | 985 | ANCEV-----SD-GKSLD--YIESNREMFAELLAHVSEFAKRYTLAE--ANLNKIN-Q LFE-QN---KEGDIKA-- | 1043 |
| WP_038409211 | 1216 | KNCEA-----ND-GESLA--YIEMHREMFAELLAYISEFAKRYTLAN--DRLEKIN-M FFE-QN---KKGDIKV-- | 1274 |
| EFR95520 | 835 | KNCEA-----ND-GESLA--YIEMHREMFAELLAYISEFAKRYTLAN--DRLEKIN-M FFE-QN---KKGDIKV-- | 893 |
| WP_003723650 | 1216 | KNCEA-----SD-GKSLK--YIEAHRETFSELLAQVSEFATRYTLAD--ANLSKIN-N LFE-QN---KEGDIKA-- | 1274 |
| WP_003727705 | 1216 | KNCEA-----SD-GKSLK--YIEAHRETFSELLAQVSEFATKYTLAD--ANLSKIN-N LFE-QN---KEGDIKA-- | 1274 |
| WP_003730785 | 1216 | KNCEA-----SD-GKSLK--YIEAHRETFSELLAQVSEFATKYTLAD--ANLSKIN-N LFE-QN---KEGDIKA-- | 1274 |
| WP_003733029 | 1216 | EKYEA-----ID-GESLA--YIEVHRALFDELLAYISEFARKYTLSN--DRLDEIN-M LYE-RN---KDGDVKS-- | 1274 |
| WP_003739838 | 1216 | KNCEA-----SD-GKSLD--YIESNREMFGELLAHVSEFAKRYTLAD--ANLSKIN-Q LFE-QN---KDNDIKV-- | 1274 |
| WP_014601172 | 1216 | KNCEA-----SD-GKSLK--YIEAHRETFSELLAQVSEFATRYTLAD--ANLSKIN-N LFE-QN---KEGDIQA-- | 1274 |
| WP_023548323 | 1216 | EKREA-----ID-GESLA--YIEAHKAVFGELLAHISEFARKYTLAN--DKLDEIN-M LYE-RN---KDGDVKS-- | 1274 |
| WP_031665337 | 1216 | KNCEA-----SD-GKSLK--YIEAHRETFSELLAQVSEFATRYTLAD--ANLSKIN-N LFE-QN---KEGDIKA-- | 1274 |
| WP_031669209 | 1216 | EKYEA-----ID-GESLA--YIEVHRALFDELLAYISEFARKYTLSN--DRLDEIN-M LYE-RN---KDGDVKS-- | 1274 |
| WP_033920898 | 1216 | EKREA-----ID-GESLA--YIEAHKAVFGELLAHISEFARKYTLAN--DKLDEIN-M LYE-RN---KDGDVKS-- | 1274 |
| AKI42028 | 1219 | KNCEA-----SD-GKSLK--YIEAHRETFSELLAQVSEFATRYTLAD--ANLSKIN-N LFE-QN---KEGDIQA-- | 1277 |
| AKI50529 | 1219 | EKREA-----ID-GESLA--YIEAHKAVFGELLAHISEFARKYTLAN--DKLDEIN-M LYE-RN---KDGDVKS-- | 1277 |
| EFR83390 | 664 | KNCEA-----SD-GKSLK--YTEAHRETFSELLAQVSEFATRYTLAD--ANLSKIN-N LFE-QN---KEGDIKX-- | 722 |
| WP_046323366 | 1216 | KNCEA-----SD-GKSLA--YIESHREMFAELLDSISEFASRYTLAD--ANLEKIN-T IFE-QN---KSGDVKV-- | 1274 |
| AKE81011 | 1256 | SHYEKLKgSPEDnEQKQL--FVEQHKHYLDEIIEQISEFSKRVILAD--ANLDKVL-S AYN-KH---RDKPIREq- | 1321 |
| CUO82355 | 1216 | YNAIYKQ-DEDGlDNMLMi-----------QLYLQLIDKLKTLYPIY-mGIVEKFE-K FVS----i----SKEEk- | 1272 |
| WP_033162887 | 1218 | YAAMLKK-RYEYlDEEEIf-----------DLYLQLLQKMDTLYPAY-kGIAKRFF-D FKN----i----DVVEk- | 1274 |
| AGZ01981 | 1273 | SHYEKLKgSPEDnEQKQL--FVEQHKHYLDEIIEQISEFSKRVILAD--ANLDKVL-S AYN-KH---RDKPIREq- | 1338 |
| AKA60242 | 1240 | SHYEKLKgSPEDnEQKQL--FVEQHKHYLDEIIEQISEFSKRVILAD--ANLDKVL-S AYN-KH---RDKPIREq- | 1305 |
| AKS40380 | 1240 | SHYEKLKgSPEDnEQKQL--FVEQHKHYLDEIIEQISEFSKRVILAD--ANLDKVL-S AYN-KH---RDKPIREq- | 1305 |
| 4UN5_B | 1244 | SHYEKLKgSPEDnEQKQL--FVEQHKHYLDEIIEQISEFSKRVILAD--ANLDKVL-S AYN-KH---RDKPIREq- | 1309 |
| WP_010922251 | 1306 | [chemical structure] | 1365 |
| WP_039695303 | 1309 | ISN---SFI NLLTLTALGAP-ADFNFLG--EKI--PRK--R-YTSTKECL NATLIHQSITGLYETRIDLSKL-- | 1369 |
| WP_045635197 | 1307 | LAN---SFI NLLTFTALGAP-AAFKFFG--KDI--DRK--R-YTTVSEIL NATLIHQSITGLYETWIDLSKL-- | 1367 |
| 5AXW_A | | --------- ----------------------------------------- ------------------------ | |
| WP_009880683 | 990 | -AE---NII HLFTLTNLGAP-AAFKCFD--TTI--GRN--R-YKSIKEVL DATLIHQSITGLYETRIDLSQL-- | 1049 |
| WP_010922251 | 1306 | -AE---NII HLFTLTNLGAP-AAFKYFD--TTI--DRK--R-YTSTKEVL DATLIHQSITGLYETRIDLSQL-- | 1365 |
| WP_011054416 | 1306 | -AE---NII HLFTLTNLGAP-AAFKYFD--TTI--DRK--R-YTSTKEVL DATLIHQSITGLYETRIDLSQL-- | 1365 |
| WP_011284745 | 1306 | -AE---NII HLFTLTNLGAP-AAFKYFD--TTI--DRK--R-YTSTKEVL DATFIHQSITGLYETRIDLSQL-- | 1365 |
| WP_011285506 | 1306 | -AE---NII HLFTLTNLGAP-AAFKYFD--TTI--DRK--R-YTSTKEVL DATLIHQSITGLYETRIDLSQL-- | 1365 |
| WP_011527619 | 1306 | -AE---NII HLFTLTNLGAP-TAFKYFD--TTI--DRK--R-YTSTKEVL DATFIHQSITGLYETRIDLSQL-- | 1365 |
| WP_012560673 | 1306 | -AE---NII HLFTLTNLGAP-AAFKCFD--TTI--GRN--R-YKSIKEVL DATLIHQSITGLYETRIDLSQL-- | 1365 |
| WP_014407541 | 1305 | -AE---NII HLFTLTNLGAP-AAFKYFD--TTI--DRK--R-YTSTKEVL DATLIHQSITGLYETRIDLSQL-- | 1364 |
| WP_020905136 | 1306 | -AE---NII HLFTLTNLGAP-AAFKYFD--TTI--DRK--R-YTSTKEVL DATLIHQSITGLYETRIDLSQL-- | 1365 |
| WP_023080005 | 1305 | -AK---NII HLFTLTNLGAP-AAFKYFD--TTI--ERN--R-YKSIKEVL DATLIHQSITGLYETRIDLSQL-- | 1364 |
| WP_023610282 | 1305 | -AK---NII HLFTLTNLGAP-AAFKYFD--TTI--ERN--R-YKSIKEVL DATLIHQSITGLYEIRIDLSQL-- | 1364 |
| WP_030125963 | 1306 | -AE---NII HLFTLTNLGAP-AAFKYFD--TTI--GRN--R-YKSIKEVL DATLIHQSITGLYETRIDLSQL-- | 1365 |
| WP_030126706 | 1306 | -AE---NII HLFTLTNLGAP-AAFKYFD--TTI--DRK--R-YTSTKEVL DATLIHQSITGLYETRIDLSQL-- | 1365 |
| WP_031488318 | 1306 | -AE---NII HLFTLTNFGAP-AAFIYFD--TTI--GRN--R-YKSIKEVL DATLIHQSITGLYETRIDLSQL-- | 1365 |
| WP_032460140 | 1306 | -AE---NII HLFTLTNLGAP-AAFKYFD--TTI--GRN--R-YKSIKEVL DATLIHQSITGLYETRIDLSQL-- | 1365 |
| WP_032461047 | 1306 | -AE---NII HLFTLTNLGAP-AAFKYFD--TTI--GRN--R-YKSIKEVL DATLIHQSITGLYETRIDLSQL-- | 1365 |
| WP_032462016 | 1306 | -AE---NII HLFTLTNLGAP-AAFKYFD--TTI--DRK--R-YTSTKEVL DATLIHQSITGLYETRIDLSQL-- | 1365 |
| WP_032462936 | 1306 | -AE---NII HLFTLTNLGAP-AAFKYFD--TTI--DRK--R-YTSTKEVL DATLIHQSITGLYETRIDLSQL-- | 1365 |
| WP_032464890 | 1306 | -AE---NII HLFTLTNLGAP-TAFKYFD--TTI--DRK--R-YTSTKEVL DATFIHQSITGLYETRIDLSQL-- | 1365 |
| WP_033888930 | 1131 | -AE---NII HLFTLTNLGAP-AAFKYFD--TTI--DRK--R-YTSTKEVL DATLIHQSITGLYETRIDLSQL-- | 1190 |
| WP_038431314 | 1306 | -AE---NII HLFTLTNLGAP-AAFKYFD--TTI--DRK--R-YTSTKEVL DATLIHQSITGLYETRIDLSQL-- | 1365 |
| WP_038432938 | 1305 | -AK---NII HLFTLTNLGAP-AAFKYFD--TTI--ERN--R-YKSIKEVL DATLIHQSITGLYETRIDLSQL-- | 1364 |
| WP_038434062 | 1306 | -AE---NII HLFTLTNLGAP-AAFKYFD--TTI--GRN--R-YKSIKEVL DATLIHQSITGLYETRIDLSQL-- | 1365 |
| BAQ51233 | 1217 | -AE---NII HLFTLTNLGAP-AAFKYFD--TTI--DRK--R-YTSTKEVL DATLIHQSITGLYETRIDLSQL-- | 1276 |
| KGE60162 | 481 | -AE---NII HLFTLTNLGAP-AAFKYFD--TTI--DRK--R-YTSTKEVL DATLIHQSITGLYETRIDLSQL-- | 540 |
| KGE60856 | 244 | -AE---NII HLFTLTNLGAP-AAFKYFD--TTI--DRK--R-YTSTKEVL DATLIHQSITGLYETRIDLSQL-- | 303 |
| WP_002989955 | 1306 | -AE---NII HLFTLTNLGAP-TAFKYFD--TTI--DRK--R-YTSTKEVL DATFIHQSITGLYETRIDLSQL-- | 1365 |
| WP_003030002 | 1282 | LAK---SFI SLLTFTAFGAP-AAFNFFG--ENI--DRK--R-YTSVTECL NATLIHQSITGLYETRIDLSKL-- | 1342 |
| WP_003065552 | 1310 | ISN---SFI NLLTLTALGAP-ADFNFLG--EKI--PRK--R-YTSTKECL NATLIHQSITGLYETRIDLSKI-- | 1370 |
| WP_001040076 | 1307 | LAN---NII NLFTFTSLGAP-AAFKFFD--KIV--DRK--R-YTSTKEVL NSTLIHQSITGLYETRIDLGKL-- | 1367 |
| WP_001040078 | 1315 | LAN---NII NLFTFTSLGAP-AAFKFFD--KIV--DRK--R-YTSTKEVL NSTLIHQSITGLYETRIDLSKL-- | 1375 |
| WP_001040080 | 1307 | LAN---NII NLFTFTSLGAP-AAFKFFD--KIV--DRK--R-YTSTKEVL NSTLIHQSITGLYETRIDLGKL-- | 1367 |
| WP_001040081 | 1307 | LAN---NII NLFTFTSLGAP-AAFKFFD--KIV--DRK--R-YTSTKEVL NSTLIHQSITGLYETRIDLGKL-- | 1367 |
| WP_001040083 | 1307 | LAN---NII NLFTFTSLGAP-AAFKFFD--KIV--DRK--R-YTSTKEVL NSTLIHQSITGLYETRIDLGKL-- | 1367 |
| WP_001040085 | 1307 | LAN---NII NLFTFTSLGAP-AAFKFFD--KIV--DRK--R-YTSTKEVL NSTLIHQSITGLYETRIDLGKL-- | 1367 |
| WP_001040087 | 1307 | LAN---NII NLFTFTSLGAP-AAFKFFD--KIV--DRK--R-YTSTKEVL NSTLIHQSITGLYETRIDLGKL-- | 1367 |
| WP_001040088 | 1307 | LAN---NII NLFTFTSLGAP-AAFKFFD--KIV--DRK--R-YTSTKEVL NSTLIHQSITGLYETRIDLGKL-- | 1367 |
| WP_001040089 | 1307 | LAN---NII NLFTFTSLGAP-AAFKFFD--KIV--DRK--R-YTSTKEVL NSTLIHQSITGLYETRIDLGKL-- | 1367 |
| WP_001040090 | 1307 | LAN---NII NLFTFTSLGAP-AAFKFFD--KIV--DRK--R-YTSTKEVL NSTLIHQSITGLYETRIDLGKL-- | 1367 |
| WP_001040091 | 1307 | LAN---NII NLFTFTSLGAP-AAFKFFD--KIV--DRK--R-YTSTKEVL NSTLIHQSITGLYETRIDLGKL-- | 1367 |
| WP_001040092 | 1307 | LAK---NII NLFTFTSLGAP-AAFKFFD--KSV--DRK--R-YTSTKEVL DSTLIHQSITGLYETRIDLGKL-- | 1367 |
| WP_001040094 | 1307 | LAN---NII NLFTFTSLGAP-AAFKFFD--KIV--DRK--R-YTSTKEVL NSTLIHQSITGLYETRIDLGKL-- | 1367 |
| WP_001040095 | 1307 | LAN---NII NLFTFTSLGAP-AAFKFFD--KIV--DRK--R-YTSTKEVL NSTLIHQSITGLYETRIDLGKL-- | 1367 |
| WP_001040096 | 1307 | LAN---NII NLFTFTSLGAP-AAFKFFD--KIV--DRK--R-YTSTKEVL NSTLIHQSITGLYETRIDLGKL-- | 1367 |
| WP_001040097 | 1307 | LAN---NII NLFTFTSLGAP-AAFKFFD--KIV--DRK--R-YTSTKEVL NSTLIHQSITGLYETRIDLGKL-- | 1367 |
| WP_001040098 | 1307 | LAN---NII NLFTFTSLGAP-AAFKFFD--KIV--DRK--R-YTSTKEVL NSTLIHQSITGLYETRIDLGKL-- | 1367 |
| WP_001040099 | 1307 | LAN---NII NLFTFTSLGAP-AAFKFFD--KIV--DRK--R-YTSTKEVL NSTLIHKSITGLYETRIDLGKL-- | 1367 |
| WP_001040100 | 1307 | LAN---NII NLFTFTSLGAP-AAFKFFD--KIV--DRK--R-YTSTKEVL NSTLIHQSITGLYETRIDLGKL-- | 1367 |
| WP_001040104 | 1307 | LAN---NII NLFTFTSLGAP-AAFKFFD--KIV--DRK--R-YTSTKEVL NSTLIHQSITGLYETRIDLGKL-- | 1367 |
| WP_001040105 | 1307 | LAN---NII NLFTFTSLGAP-AAFKFFD--KIV--DRK--R-YTSTKEVL NSTLIHQSITGLYETRIDLGKL-- | 1367 |
| WP_001040106 | 1307 | LAN---NII NLFTFTSLGAP-AAFKFFD--KIV--DRK--R-YTSTKEVL NSTLIHQSITGLYETRIDLGKL-- | 1367 |
| WP_001040107 | 1307 | LAN---NII NLFTFTSLGAP-AAFKFFD--KIV--DRK--R-YTSTKEVL NSTLIHQSITGLYETRIDLGKL-- | 1367 |
| WP_001040108 | 1307 | LAN---NII NLFTFTSLGAP-AAFKFFD--KIV--DRK--R-YTSTKEVL NSTLIHQSITGLYETRIDLGKL-- | 1367 |
| WP_001040109 | 1307 | LAN---NII NLFTFTSLGAP-AAFKFFD--KIV--DRK--R-YTSTKEVL NSTLIHQFITGLYETRIDLGKL-- | 1367 |
| WP_001040110 | 1307 | LAN---NII NLFTFTSLGAP-AAFKFFD--KIV--DRK--R-YTSTKEVL NSTLIHQSITGLYETRIDLGKL-- | 1367 |
| WP_015058523 | 1307 | LAK---NII NLFTFTSLGAP-AAFKFFD--KSV--DRK--R-YTSTKEVL DSTLIHQSITGLYETRIDLGKL-- | 1367 |
| WP_017643650 | 1307 | LAN---NII NLFTFTSLGAP-AAFKFFD--KIV--DRK--R-YTSTKEVL NSTLIHQSITGLYETRIDLGKL-- | 1367 |
| WP_017647151 | 1307 | LAN---NII NLFTFTSLGAP-AAFKFFD--KIV--DRK--R-YTSTKEVL NSTLIHQSITGLYETRIDLGKL-- | 1367 |
| WP_017648376 | 1307 | LAN---NII NLFTFTSLGAP-AAFKFFD--KIV--DRK--R-YTSTKEVL NSTLIHQSITGLYETRIDLGKL-- | 1367 |
| WP_017649527 | 1307 | LAN---NII NLFTFTSLGAP-AAFKFFD--KIV--DRK--R-YTSTKEVL NSTLIHQSITGLYETRIDLGKL-- | 1367 |
| WP_017771611 | 1307 | LAN---NII NLFTFTSLGAP-AAFKFFD--KIV--DRK--R-YTSTKEVL NSTLIHQSITGLYETRIDLGKL-- | 1367 |
| WP_017771984 | 1307 | LAN---NII NLFTFTSLGAP-AAFKFFD--KIV--DRK--R-YTSTKEVL NSTLIHQSITGLYETRIDLGKL-- | 1367 |
| CFQ25032 | 1307 | LAN---NII NLFTFTSLGAP-AAFKFFD--KIV--DRK--R-YTSTKEVL NSTLIHQSITGLYETRIDLGKL-- | 1367 |
| CFV16040 | 1307 | LAN---NII NLFTFTSLGAP-AAFKFFD--KIV--DRK--R-YTSTKEVL NSTLIHQSITGLYETRIDLGKL-- | 1367 |
| KLJ37842 | 1307 | LAN---NII NLFTFTSLGAP-AAFKFFD--KIV--DRK--R-YTSTKEVL NSTLIHQSITGLYETRIDLGKL-- | 1367 |
| KLJ72361 | 1307 | LAN---NII NLFTFTSLGAP-AAFKFFD--KIV--DRK--R-YTSTKEVL NSTLIHQSITGLYETRIDLGKL-- | 1367 |
| KLL20707 | 1321 | LAN---NII NLFTFTSLGAP-AAFKFFD--KIV--DRK--R-YTSTKEVL NSTLIHQSITGLYETRIDLGKL-- | 1381 |
| KLL42645 | 1307 | LAN---NII NLFTFTSLGAP-AAFKFFD--KIV--DRK--R-YTSTKEVL NSTLIHQSITGLYETRIDLGKL-- | 1367 |
| WP_047207273 | 1307 | LAN---NII NLFTFTSLGAP-AAFKFFD--KIV--DRK--R-YTSTKEVL NSTLIHQSITGLYETRIDLGKL-- | 1367 |
| WP_047209694 | 1307 | LAN---NII NLFTFTSLGAP-AAFKFFD--KIV--DRK--R-YTSTKEVL NSTLIHKSITGLYETRIDLGKL-- | 1367 |
| WP_050198062 | 1307 | LAN---NII NLFTFTSLGAP-AAFKFFD--KIV--DRK--R-YTSTKEVL NSTLIHQSITGLYETRIDLGKL-- | 1367 |
| WP_050201642 | 1307 | LAN---NII NLFTFTSLGAP-AAFKFFD--KIV--DRK--R-YTSTKEVL NSTLIHQSITGLYETRIDLGKL-- | 1367 |
| WP_050204027 | 1307 | LAN---NII NLFTFTSLGAP-AAFKFFD--KIV--DRK--R-YTSTKEVL NSTLIHQSITGLYETRIDLGKL-- | 1367 |
| WP_050881965 | 1307 | LAN---NII NLFTFTSLGAP-AAFKFFD--KII--DRK--R-YTSTKEVL NSTLIHQSITGLYETRIDLGKL-- | 1367 |
| WP_050886065 | 1307 | LAN---NII NLFTFTSLGAP-AAFKFFD--KIV--DRK--R-YTSTKEVL NSTLIHQSITGLYETRIDLGKL-- | 1367 |
| AHN30376 | 1307 | LAK---NII NLFTFTSLGAP-AAFKFFD--KSV--DRK--R-YTSTKEVL DSTLIHQSITGLYETRIDLGKL-- | 1367 |
| EAO78426 | 1307 | LAN---NII NLFTFTSLGAP-AAFKFFD--KIV--DRK--R-YTSTKEVL NSTLIHQSITGLYETRIDLGKL-- | 1367 |
| CCW42055 | 1307 | LAN---NII NLFTFTSLGAP-AAFKFFD--KIV--DRK--R-YTSTKEVL NSTLIHQSITGLYETRIDLGKL-- | 1367 |
| WP_003041502 | 1314 | ICT---SFL GLFELTSLGSA-SDFEFLG--VKI--PRY--RdYTPSSLLK DSTLIHQSITGLYETRIDLSKL-- | 1383 |
| WP_037593752 | 1283 | LAK---SFI SLLTFTAFGAP-AAFNFFG--ENI--DRK--R-YTSVTECL NATLIHQSITGLYETRIDLSKL-- | 1343 |
| WP_049516684 | 1283 | LAK---SFI SLLTFTAFGAP-AAFNFFG--ENI--DRK--R-YTSVTECL NATLIHQSITGLYETRIDLSKL-- | 1343 |
| GAD46167 | 1282 | LAK---SFI SLLTFTAFGAP-AAFNFFG--ENI--DRK--R-YTSVTECL NATLIHQSITGLYETRIDLSKL-- | 1342 |
| WP_018363470 | 1314 | ISD---SFI NLLTLTALGAP-ADFNFLG--EKI--PRK--R-YNSTKECL NATLIHQSITGLYETRIDLSKL-- | 1374 |
| WP_003043819 | 1311 | -SN---SFV SLLKYTSFGAS-GGFTFLD--LDVkgGRL--R-YQTVTEVL DATLIYQSITGLYETRTDLSQL-- | 1372 |
| WP_006269658 | 1282 | LAK---SFI SLLTFTAFGAP-AAFNFFG--ENI--DRK--R-YTSVTECL NATLIHQSITGLYETRIDLSKL-- | 1342 |
| WP_048800889 | 1302 | ISN---SFI HLLTLTALGAP-ADFNFLG--EKI--PRK--R-YTSTKECL NATLIHQSITGLYETQTDLSKL-- | 1362 |
| WP_012767106 | 1309 | -CS---SVI NLLTLTASGAP-ADFKFLG--TTI--PRK--R-YGSPQSIL SSTLIHQSITGLYETRIDLSQL-- | 1368 |
| WP_014612333 | 1309 | -CS---SVI NLLTLTASGAP-ADFKFLG--TTI--PRK--R-YGSPQSIL SSTLIHQSITGLYETRIDLSQL-- | 1368 |
| WP_015017095 | 1309 | -CS---SVI NLLTLTASGAP-ADFKFLG--TTI--PRK--R-YGSPQSIL SSTLIHQSITGLYETRIDLSQL-- | 1368 |
| WP_015057649 | 1309 | -CS---SVI NLLTLTASGAP-ADFKFLG--TTI--PRK--R-YGSPQSIL SSTLIHQSITGLYETRIDLSQL-- | 1368 |
| WP_048327215 | 1309 | -CS---SVI NLLTLTASGAP-ADFKFLG--TTI--PRK--R-YGSPQSIL SSTLIHQSITGLYETRIDLSQL-- | 1368 |
| WP_049519324 | 1309 | -CS---SVI NLLTLTASGAP-ADFKFLG--TTI--PRK--R-YGSPQSIL SSTLIHQSITGLYETRIDLSQL-- | 1368 |
| WP_012515931 | 1286 | -AE---NII NVFTFVALGAP-AAFKFFD--ATI--DRK--R-YTSTKEVL NATLIHQSVTGLYETRIDLSQL-- | 1345 |
| WP_021320964 | 1286 | -AE---NII NVFTFVALGAP-AAFKFFD--ATI--DRK--R-YTSTKEVL NATLIHQSVTGLYETRIDLSQL-- | 1345 |
| WP_037581760 | 1286 | -AE---NII NVFTFVALGAP-AAFKFFD--ATI--DRK--R-YTSTKEVL NATLIHQSVTGLYETRIDLSQL-- | 1345 |
| WP_004232481 | 1309 | ISSlseSFI NLLKFISFGAP-GAFKFLK--LDV--KQSnlR-YKSTTEAL SATLIHQSVTGLYETRIDLSKL-- | 1374 |
| WP_009854540 | 1307 | ISN---SFI NLLTLTALGAP-ADFNFLG--EKI--PRK--R-YTSTKECL TATLIHQSITGLYETRIDLSKL-- | 1367 |
| WP_012962174 | 1308 | ISI---SFV NLLTLTALGAP-ADFNFLG--EKI--PRK--R-YTSTKECL NATLIHQSITGLYETRIDLSKL-- | 1368 |
| WP_039695303 | 1309 | ISN---SFI NLLTLTALGAP-ADFNFLG--EKI--PRK--R-YTSTKECL NATLIHQSITGLYETRIDLSKL-- | 1369 |
| WP_014334983 | 1312 | ISA---SFI NLLTLTALGAP-ADFNFLG--EKI--PRK--R-YTSTKECL SATLIHQSVTGLYETRIDLSKL-- | 1372 |
| WP_003099269 | 1306 | -AI---NML NLFTFTDLGAP-SAFKFFN--GDI--DRK--R-YSSTNEII NSTLIYQSPTGLYETRIDLSKL-- | 1365 |
| AHY15608 | | --------- ----------------------------------------- ------------------------ | |
| AHY17476 | | --------- ----------------------------------------- ------------------------ | |
| ESR09100 | 138 | -AI---NML NLFTFTDLGAP-SAFKFFNg--DI--DRK--R-YSSTNEII NSTLIYQSPTGLYETRIDLSKL-- | 197 |
| AGM98575 | | --------- ----------------------------------------- ------------------------ | |
| ALF27331 | 1282 | LAS---SFI NLLTFTAIGAP-AAFKFFD--NNI--DRK--R-YTSTTEIL NATLIHQSITGLYETRIDLSRL-- | 1342 |
| WP_018372492 | 1290 | VAR---SFV -LLNFTMMGAA-TDFKFFG--QII--PRK--R-YPSTTECL KSTLIHQSVTGLYETRIDLSKL-- | 1350 |
| WP_045618028 | 1311 | LSE---SFI SLLKLISFGAP-GTFKFLG--VEI--SQSnvR-YQSVSSCF NATLIHQSITGLYETRIDLSKL-- | 1373 |
| WP_045635197 | 1307 | LAN---SFI NLLTFTALGAP-AAFKFFG--KDI--DRK--R-YTTVSEIL NATLIHQSITGLYETWIDLSKL-- | 1367 |
| WP_002263549 | 1282 | LAS---SFI NLLTFTAIGAP-ATFKFFD--KNI--DRK--R-YTSTTEIL NATLIHQSITGLYETRIDLNKL-- | 1342 |
| WP_002263887 | 1282 | LAS---SFI NLLTFTAIGAP-ATFKFFD--KNI--DRK--R-YTSTTEIL NATLIHQSITGLYETRIDLNKL-- | 1342 |
| WP_002264920 | 1282 | LAS---SFI NLLTFTAIGAP-ATFKFFD--KNI--DRK--R-YTSTTEIL NATLIHQSITGLYETRIDLSKL-- | 1342 |
| WP_002269043 | 1282 | LAS---SFI NLLTFTAIGAP-ATFKFFD--KNI--DRK--R-YTSTTEIL NATLIHQSITGLYETRIDLNKL-- | 1342 |
| WP_002269448 | 1282 | LAS---SFI NLLTFTAIGAP-ATFKFFD--KNI--DRK--R-YTSTTEIL NATLIHQSITGLYETRIDLSKL-- | 1342 |
| WP_002271977 | 1282 | LAS---SFI NLLTFTAIGAP-ATFKFFD--KNI--DRK--R-YTSTTEIL NATLIHQSITGLYETRIDLSKL-- | 1342 |
| WP_002272766 | 1282 | LAS---SFI NLLTFTAIGAP-ATFKFFD--KNI--DRK--R-YTSTTEIL NATLIHQSITGLYETRIDLSKL-- | 1342 |
| WP_002273241 | 1282 | LAS---SFI NLLTFTAIGAP-ATFKFFD--KNI--DRK--R-YTSTTEIL NATLIHQSITGLYETRIDLSKL-- | 1342 |
| WP_002275430 | 1282 | LSS---SFI NLLTFTAIGAP-AAFKFFD--KNI--DRK--R-YTSTTEIL NATLIHQSITGLYETRIDLSKL-- | 1342 |
| WP_002276448 | 1282 | LAS---SFI NLLTFTAIGAP-ATFKFFD--KNI--DRK--R-YTSTTEIL NATLIHQSITGLYETRIDLSKL-- | 1342 |
| WP_002277050 | 1288 | LAD---GFI KLLGFTQLGAT-SPFSFLG--IKL--NQK--Q-YTGKKDYL EATLIHQSITGLYETRIDLNKL-- | 1352 |
| WP_002277364 | 1282 | LAS---SFI NLLTFTAIGAP-ATFKFFD--KNI--DRK--R-YTSTTEIL NATLIHQSITGLYETRIDLSKL-- | 1342 |
| WP_002279025 | 1282 | LAS---SFI NLLTFTAIGAP-ATFKFFD--KNI--DRK--R-YTSTTEIL NATLIHQSITGLYETRIDLSKL-- | 1342 |
| WP_002279859 | 1282 | LAS---SFI NLLTFTAIGAP-ATFKFFD--KNI--DRK--R-YTSTTEIL NATLIHQSITGLYETRIDLSKL-- | 1342 |
| WP_002280230 | 1282 | LAS---SFI NLLTFTAIGAP-ATFKFFD--KNI--DRK--R-YTSTTEIL NATLIHQSITGLYETRIDLSKL-- | 1342 |
| WP_002281696 | 1282 | LSS---SFI NLLTFTAIGAP-AAFKFFD--KNI--DRK--R-YTSTTEIL NATLIHQSITGLYETRIDLSKL-- | 1342 |
| WP_002282247 | 1288 | LAD---GFI KLLGFTQLGAT-SPFSFLG--IKL--NQK--Q-YTGKKDYL EATLIHQSITGLYETRIDLSKL-- | 1352 |
| WP_002282906 | 1282 | LAS---SFI NLLTFTAIGAP-ATFKFFD--KNI--DRK--R-YTSTTEIL NATLIHQSITGLYETRIDLSKL-- | 1342 |
| WP_002283846 | 1282 | LAS---SFI NLLTFTAIGAP-ATFKFFD--KNI--DRK--R-YTSTTEIL NATLIHQSITGLYETRIDLSKL-- | 1342 |
| WP_002287255 | 1282 | LAS---SFI NLLTFTAIGAP-ATFKFFD--KNI--DRK--R-YTSTTEIL NATLIHQSITGLYETRIDLSKL-- | 1342 |
| WP_002288990 | 1282 | LAS---SFI NLLTFTAIGAP-AAFKFFD--KNI--DRK--R-YTSTTEIL NATLIHQSITGLYETRIDLSKL-- | 1342 |
| WP_002289641 | 1282 | LAS---SFI NLLTFTAIGAP-ATFKFFD--KNI--DRK--R-YTSTTEIL NATLIHQSITGLYETRIDLSKL-- | 1342 |
| WP_002290427 | 1282 | LAS---SFI NLLTFTAIGAP-ATFKFFD--KNI--DRK--R-YTSTTEIL NATLIHQSITGLYETRIDLSKL-- | 1342 |
| WP_002295753 | 1282 | LAS---SFI NLLTFTAIGAP-AAFKFFD--KNI--DRK--R-YTSTTEIL NATLIHQSITGLYETRIDLSKL-- | 1342 |
| WP_002296423 | 1282 | LAS---SFI NLLTFTAIGAP-ATFKFFD--KNI--DRK--R-YTSTTEIL NATLIHQSITGLYETRIDLSKL-- | 1342 |
| WP_002304487 | 1296 | LAS---SFI NLLTFTAIGAP-AAFKFFD--KNI--DRK--R-YTSTTEIL NATLIHQSITGLYETRIDLNKL-- | 1356 |
| WP_002305844 | 1282 | LAS---SFI NLLTFTAIGAP-ATFKFFD--KNI--DRK--R-YTSTTEIL NATLIHQSITGLYETRIDLSKL-- | 1342 |
| WP_002307203 | 1282 | LAS---SFI NLLTFTAIGAP-ATFKFFD--KNI--DRK--R-YTSTTEIL NATLIHQSITGLYETRIDLSKL-- | 1342 |
| WP_002310390 | 1282 | LAS---SFI NLLTFTAIGAP-ATFKFFD--KNI--DRK--R-YTSTTEIL NATLIHQSITGLYETRIDLSKL-- | 1342 |
| WP_002352408 | 1282 | LAS---SFI NLLTFTAIGAP-ATFKFFD--KNI--DRK--R-YTSTTEIL NATLIHQSITGLYETRIDLSKL-- | 1342 |
| WP_012997688 | 1282 | LAS---SFI NLLTFTAIGAP-ATFKFFD--KNI--DRK--R-YTSTTEIL NATLIHQSITGLYETRIDLSKL-- | 1342 |
| WP_014677909 | 1282 | LAS---SFI NLLTFTAIGAP-ATFKFFD--KNI--DRK--R-YTSTTEIL NATLIHQSITGLYETRIDLSKL-- | 1342 |
| WP_019312892 | 1282 | LAS---SFI NLLTFTAIGAP-ATFKFFD--KNI--DRK--R-YTSTTEIL NATLIHQSITGLYETRIDLSKL-- | 1342 |
| WP_019313659 | 1282 | LAS---SFI NLLTFTAIGAP-ATFKFFD--KNI--DRK--R-YTSTTEIL NATLIHQSITGLYETRIDLNKL-- | 1342 |
| WP_019314093 | 1282 | LAS---SFI NLLTFTAIGAP-AAFKFFD--KNI--DRK--R-YTSTTEIL NATLIHQSITGLYETRIDLSKL-- | 1342 |
| WP_019315370 | 1282 | LSS---SFI NLLTFTAIGAP-AAFKFFD--KNI--DRK--R-YTSTTEIL NATLIHQSITGLYETRIDLSKL-- | 1342 |
| WP_019803776 | 1282 | LAS---SFI NLLTFTAIGAP-ATFKFFD--KNI--DRK--R-YTSTTEIL NATLIHQSITGLYETRIDLNKL-- | 1342 |
| WP_019805234 | 1282 | LAS---SFI NLLTFTAIGAP-ATFKFFD--KNI--DRK--R-YTSTTEIL NATLIHQSITGLYETRIDLSKL-- | 1342 |
| WP_024783594 | 1282 | LAS---SFI NLLTFTAIGAP-ATFKFFD--KNI--DRK--R-YTSTTEIL NATLIHQSITGLYETRIDLNKL-- | 1342 |
| WP_024784288 | 1288 | LAD---GFI KLLGFTQLGAT-SPFSFLG--IKL--NQK--Q-YTGKKDYL EATLIHQSITGLYETRIDLSKL-- | 1352 |
| WP_024784666 | 1282 | LAS---SFI NLLTFTAIGAP-ATFKFFD--KNI--DRK--R-YTSTTEIL NATLIHQSITGLYETRIDLSKL-- | 1342 |
| WP_024784894 | 1282 | LAS---SFI NLLTFTAIGAP-ATFKFFD--KNI--DRK--R-YTSTTEIL NATLIHQSITGLYETRIDLSKL-- | 1342 |
| WP_024786433 | 1288 | LAD---GFI KLLGFTQLGAT-SPFSFLG--IKL--NQK--Q-YTGKKDYL EATLIHQSITGLYETRIDLSKL-- | 1352 |
| WP_049473442 | 1282 | LAS---SFI NLLTFTAIGAP-ATFKFFD--KNI--DRK--R-YTSTTEIL NATLIHQSITGLYETRIDLSKL-- | 1342 |
| WP_049474547 | 1282 | LAS---SFI NLLTFTAIGAP-ATFKFFD--KNI--DRK--R-YTSTTEIL KATLIHQSITGLYETRIDLSKL-- | 1342 |
| EMC03581 | 1275 | LAS---SFI NLLTFTAIGAP-ATFKFFD--KNI--DRK--R-YTSTTEIL NATLIHQSITGLYETRIDLSKL-- | 1335 |
| WP_000428612 | 1310 | LAN---SFI NLLTFTALGAP-AAFKFFG--KDV--DRK--R-YTTVSEIL NATLIHQSITGLYETRIDLSKL-- | 1370 |
| WP_000428613 | 1308 | LAN---SFI NLLTFTALGAP-AAFKFFG--KDI--DRK--R-YTTVSEIL NATLIHQSITGLYETRIDLSKL-- | 1368 |
| WP_049523028 | 1303 | IAN---SFI NLLTFTAFGAP-AVFKFFG--KDI--ERK--R-YSTVTEIL KATLIHQSLTGLYETRIDLSKL-- | 1363 |
| WP_003107102 | 1275 | -AT---NML NLFTFTGLGAP-ATLKFFN--VDI--DRK--R-YTSSTEIL NSTLIRQSITGLYETRIDLSKI-- | 1334 |
| WP_054279288 | 1304 | -SI---SFL NLFKFTSFGAP-EKFTFLN--SEIkgDDV--R-YRSTKECL NSTLIHQSVTGLYETRIDLSQF-- | 1365 |
| WP_049531101 | 1311 | LSE---SFI SLLKLTSFGAP-GAFRFLG--VEI--SQSnvR-YQSVSSCF NATLIHQSITGLYETRIDLSKL-- | 1373 |
| WP_049538452 | 1311 | LSE---SFI SLLKLTSFGAP-GAFKFLG--VEI--SQSsvR-YKPNSQFL DATLIHQSITGLYETRIDLSKL-- | 1373 |
| WP_049549711 | 1313 | LSE---SFI SLLKLTSFGAP-GAFKFLG--AEI--SQSsvR-YKPNSQFL DTTLIHQSITGLYETRIDLSKL-- | 1375 |
| WP_007896501 | 1312 | -AL---NML NLFIFTSLGAP-STFVFFD--ETI--DRK--R-YTTSSDVL NGILIQQSITGLYETRIDLSRF-- | 1371 |
| EFR44625 | 1264 | -AL---NML NLFIFTSLGAP-STFVFFD--ETI--DRK--R-YTTSSDVL NGILIQQSITGLYETRIDLSRF-- | 1323 |
| WP_002897477 | 1307 | LAN---SFI NLLTFTALGAP-AAFKFFG--KDV--DRK--R-YTTVSEIL NATLIHQSITGLYETRIDLSKL-- | 1367 |
| WP_002906454 | 1312 | LSE---SFI SLLKLTSFGAP-GAFKFLG--VEI--SQSsvR-YKPNSQFL DTTLIHQSITGLYETRIDLSKL-- | 1374 |
| WP_009729476 | 1308 | LAN---SFI NLLTFTALGAP-AAFKFFG--KDV--DRK--R-YTTVSEIL NATLIHQSITGLYETRIDLSKL-- | 1368 |
| CQR24647 | 1296 | LAQ---SFI SLLKFTAFGAP-GGFKFLD--ADI--KQSnlR-YQTVTEVL SSTLIHQSVTGLYETRIDLSKL-- | 1358 |
| WP_000066813 | 1312 | LAN---SFI NLLTFTALGAP-AAFKFLG--KDV--DRK--R-YTTVSEIL NATLIHQSITGLYETRIDLSKL-- | 1372 |
| WP_009754323 | 1308 | LAN---SFI NLLTFTALGAP-AAFKFFG--KDV--DRK--R-YTTVSEIL NATLIHQSITGLYETRIDLSKL-- | 1368 |
| WP_044674937 | 1301 | LTS---SFV NLLTFTAIGAP-AAFKFLG--SVI--DRK--R-YTSIAEIL EATLIHQSVTGLYETRIDLSKL-- | 1361 |
| WP_044676715 | 1303 | LTS---SFV NLLTFTAIGAP-AAFKFLG--SVI--DRK--R-YTSIAEIL EATLIHQSVTGLYETRIDLSKL-- | 1363 |
| WP_044680361 | 1303 | LTS---SFV NLLTFTAIGAP-AAFKFLG--SVI--DRK--R-YTSIAEIL EATLIHQSVTGLYETRIDLSKL-- | 1363 |
| WP_044681799 | 1301 | LTS---SFV NLLTFTAIGAP-AAFKFLG--SVI--DRK--R-YTSIAEIL EATLIHQSVTGLYETRIDLSKL-- | 1361 |
| WP_049533112 | 1314 | ICT---SFL GLFELTSLGSA-SDFEFLG--VKI--PRY--RdYTPSSLLK DSTLIHQSITGLYETRIDLSKL-- | 1383 |
| WP_029090905 | 1241 | -VK----VI ELLKITQANATnGDLKLLK----M-sNREg-R-LGSVSVAL DFKIINQSVTGLYQSIEDYNN--- | 1300 |
| WP_006506696 | 1269 | -AN----II QMLIVMHRGPQnGNIVYDDf--KI-sDRIg-R-LKTKNHNL NIVFISQSPTGIYTKKYKL----- | 1329 |
| AIT42264 | 1306 | -AE---NII HLFTLTNLGAP-AAFKYFD--TTI--DRK--R-YTSTKEVL DATLIHQSITGLYETRIDLSQL-- | 1365 |
| WP_034440723 | 1277 | LVE---SFI NLLAITKCGPA-ADITFLG--EKI--SRK--R-YRSTNCLW GSEVIFQSPTGLYETRLRLE---- | 1335 |
| AKQ21048 | 1306 | -AE---NII HLFTLTNLGAP-AAFKYFD--TTI--DRK--R-YTSTKEVL DATLIHQSITGLYETRIDLSQL-- | 1365 |
| WP_004636532 | 1272 | TVE---SFV NLMTFTAMGAP-ATFKFYG--ESI--TRS--R-YTSITEFR GSTLIFQSITGLYETRYKL----- | 1329 |
| WP_002364836 | 1278 | IAA---SFI QLMQFNAMGAP-STFKFFQ--KDI--ERA--R-YTSIKEIF DATIIYQSTTGLYETRRKV----- | 1335 |
| WP_016631044 | 1229 | IAA---SFI QLMQFNAMGAP-STFKFFQ--KDI--ERA--R-YTSIKEIF DATIIYQSPTGLYETRRKV----- | 1286 |
| EMS75795 | 1014 | LSQ---SFI NLMQLNAMGAP-ADFKFFD--VII--PRK--R-YPSLTEIW ESTITYQSITGLRETRTRMATLwd | 1076 |
| WP_002373311 | 1278 | IAA---SFI QLMQFNAMGAP-STFKFFQ--KDI--ERA--R-YTSIKEIF DATIIYQSTTGLYETRRKV----- | 1335 |
| WP_002378009 | 1278 | IAA---SFI QLMQFNAMGAP-STFKFFQ--KDI--ERA--R-YTSIKEIF DATIIYQSTTGLYETRRKV----- | 1335 |
| WP_002407324 | 1278 | IAA---SFI QLMQFNAMGAP-STFKFFQ--KDI--ERA--R-YTSIKEIF DATIIYQSTTGLYETRRKV----- | 1335 |
| WP_002413717 | 1278 | IAA---SFI QLMQFNAMGAP-STFKFFQ--KDI--ERA--R-YTSIKEIF DATIIYQSTTGLYETRRKV----- | 1335 |
| WP_010775580 | 1280 | IAA---SFI QLMQFNAMGAP-STFKFFQ--KDI--ERA--R-YTSIKEIF DATIIYQSTTGLYETRRKV----- | 1337 |
| WP_010818269 | 1278 | IAA---SFI QLMQFNAMGAP-STFKFFQ--KDI--ERA--R-YTSIKEIF DATIIYQSTTGLYETRRKV----- | 1335 |
| WP_010824395 | 1278 | IAA---SFI QLMQFNAMGAP-STFKFFQ--KDI--ERA--R-YTSIKEIF DATIIYQSTTGLYETRRKV----- | 1335 |
| WP_016622645 | 1278 | IAA---SFI QLMQFNAMGAP-STFKFFQ--KDI--ERA--R-YTSIKEIF DATIIYQSTTGLYETRRKV----- | 1335 |
| WP_033624816 | 1278 | IAA---SFI QLMQFNAMGAP-STFKFFQ--KDI--ERA--R-YTSIKEIF DATIIYQSTTGLYETRRKV----- | 1335 |
| WP_033625576 | 1278 | IAA---SFI QLMQFNAMGAP-STFKFFQ--KDI--ERA--R-YTSIKEIF DATIIYQSTTGLYETRRKV----- | 1335 |
| WP_033789179 | 1278 | IAA---SFI QLMQFNAMGAP-STFKFFQ--KDI--ERA--R-YTSIKEIF DATIIYQSTTGLYETRRKV----- | 1335 |
| WP_002310644 | 1280 | LAS---SFV NLMQFNAMGAP-ADFKFFD--VTI--PRK--R-YTSLTEIW QSTIIHQSITGLYETRIRMGK--- | 1339 |
| WP_002312694 | 1281 | LAS---SFV NLMQFNAMGAP-ADFKFFD--VTI--PRK--R-YTSLTEIW QSTIIHQSITGLYETRIRMGK--- | 1340 |
| WP_002314015 | 1281 | LAS---SFV NLMQFNAMGAP-ADFKFFD--VTI--PRK--R-YTSLTEIW QSTIIHQSITGLYETRIRMGK--- | 1340 |
| WP_002320716 | 1281 | LAS---SFV NLMQFNAMGAP-ADFKFFD--VTI--PRK--R-YTSLTEIW QSTIIHQSITGLYETRIRMGK--- | 1340 |
| WP_002330729 | 1280 | LAS---SFV NLMQFNAMGAP-ADFKFFD--VTI--PRK--R-YTSLTEIW QSTIIHQSITGLYETRIRMGK--- | 1339 |
| WP_002335161 | 1281 | LAS---SFV NLMQFNAMGAP-ADFKFFD--VTI--PRK--R-YTSLTEIW QSTIIHQSITGLYETRIRMGK--- | 1340 |
| WP_002345439 | 1281 | LAS---SFV NLMQFNAMGAP-ADFKFFD--VTI--PRK--R-YTSLTEIW QSTIIHQSITGLYETRIRMGK--- | 1340 |
| WP_034867970 | 1271 | IAQ---SFL QLLQFNAIGAP-ADFKFFG--VTI--PRK--R-YTSLTEIW DATIIYQSVTGLYETRIRMGDLwa | 1333 |
| WP_047937432 | 1281 | LAS---SFV NLMQFNAMGAP-ADFKFFD--VTI--PRK--R-YTSLTEIW QSTIIHQSITGLYETRIRMGK--- | 1340 |
| WP_010720994 | 1271 | IAQ---SFL QLLQFNAIGAP-ADFKFFG--VTI--PRK--R-YTSLTEIW DATIIYQSVTGLYETRIRMGDLwa | 1333 |
| WP_010737004 | 1271 | IAQ---SFL QLLQFNAIGAP-ADFKFFG--VTI--PRK--R-YTSLTEIW DATIIYQSVTGLYETRIRMGDLwa | 1333 |
| WP_034700478 | 1271 | IAQ---SFL QLLQFNAIGAP-ADFKFFG--VTI--PRK--R-YTSLTEIW DATIIYQSVTGLYETRIRMGDLwa | 1333 |
| WP_007209003 | 1270 | IAK---SFI NLLIFTAMGAP-ADFEFFG--EKI--PRK--R-YVSISEII DAVFIHQSITGLYETRVRLTEV-- | 1330 |
| WP_023519017 | 1265 | MID---AIL SLLKFTLFGAS-VEFKFFD--IKI---LK--R-YKSLTDIW EATIIYQSVTGLYERRVEVRKLwd | 1326 |
| WP_010770040 | 1275 | IAE---SFV NLMKFSAYGAP-MDFKFFG--KTI--PRS--R-YTSVGELL SATIINQSITGLYETRRKL----- | 1332 |
| WP_048604708 | 1271 | IAQ---SFV DLMQLNAFGAP-ADFKFFG--ETI--PRK--R-YTSVNELL EATIINQSITGLYETRRRL----- | 1328 |
| WP_010750235 | 1274 | MAH---SFV NLMQFNALGAP-ADFKFFD--TTI--TRK--R-YISLTEIW QSTIIYQSVTGLYETRRRMADLwd | 1336 |
| AII16583 | 1345 | -AE---NII HLFTLINLGAP-AAFKYFD--TTI--DRK--R-YISTKEVL DATLIHQSITGLYETRIDLSQL-- | 1404 |
| WP_029073316 | 1283 | -CE----VI QMLVVMHAGPQnGNITFDDf--KL-sNRLg-R-LNCKTISL TIVFIADSPIGMYSKKYKL----- | 1343 |
| WP_031589969 | 1284 | -CN----II QILATLHCNSSiGKIMYSDf--KI-sTTIg-R-LNGRTISL DISFIAESPTGMYSKKYKL----- | 1344 |
| KDA45870 | 1254 | LGK---NFV ELLRYTADGAA-SDFKFFG--ENI--PRK--R-YNSAGSLL NGTLIYQSKTGLYETRIDLGKL-- | 1314 |
| WP_039099354 | 1307 | ILDr----V -LIGLHANAAV-SDLGVLKisTPL--GKM--Q---QPSGIS DTQIIYQSPTGLFERRVALRDL-- | 1368 |
| AKP02966 | 1297 | INSl-eELI ILLHANSTSAH-LIFNNIE-kKAF--GRK-------THGLT DTDFIYQSVTGLYETRIHIE---- | 1356 |
| WP_010991369 | 1275 | IAQ---SFV DLMAFNAMGAP-ASFKFFE--TTI--ERK--R-YNNLKELL NSTIIYQSITGLYESRKRL----- | 1332 |
| WP_033838504 | 1275 | IAQ---SFV DLMAFNAMGAP-ASFKFFE--TTI--ERK--R-YNNLKELL NSTIIYQSITGLYESRKRL----- | 1332 |
| EHN60060 | 1278 | IAQ---SFV DLMAFNAMGAP-ASFKFFE--TTI--ERK--R-YNNLKELL NSTIIYQSITGLYESRKRL----- | 1335 |
| EFR89594 | 1044 | IAQ---SFV DLMAFNAMGAP-ASFKFFE--TTI--ERK--R-YNNLKELL NSTIIYQSITGLYESRKRL----- | 1101 |
| WP_038409211 | 1275 | IAK---SFD KLKVFNAFGAP-RDFEFFE--TTI--KRK--R-YYNIKELL NATIIYQSITGLYEARKRL----- | 1332 |
| EFR95520 | 894 | IAK---SFD KLKVFNAFGAP-RDFEFFE--TTI--KRK--R-YYNIKELL NATIIYQSITGLYEARKRL----- | 951 |
| WP_003723650 | 1275 | IAQ---SFV DLMAFNAMGAP-ASFKFFE--ATI--DRK--R-YTNLKELL SSTIIYQSITGLYESRKRL----- | 1332 |
| WP_003727705 | 1275 | IAQ---SFV DLMAFNAMGAP-ASFKFFE--ATI--DRK--R-YTNLKELL SSTIIYQSITGLYESRKRL----- | 1332 |
| WP_003730785 | 1275 | IAQ---SFV DLMAFNAMGAP-ASFKFFE--ATI--DRK--R-YTNLKELL SSTIIYQSITGLYESRKRL----- | 1332 |
| WP_003733029 | 1275 | IAE---SFV SLKKFNAFGVH-QDFSFFG--TKI--ERK--R-DRKLNELL NSTIIYQSITGLYESRKRL----- | 1332 |
| WP_003739838 | 1275 | IAQ---SFV NLMAFNAMGAP-ASFKFFE--ATI--ERK--R-YTNLKELL SATIIYQSITGLYEARKRL----- | 1332 |
| WP_014601172 | 1275 | IAQ---SFV DLMAFNAMGAP-ASFKFFE--ATI--DRK--R-YTNLKELL SSTIIYQSITGLYESRKRL----- | 1332 |
| WP_023548323 | 1275 | IAE---SFV SLKKFNAFGVH-KDFNFFG--TTI--KRK--R-DRKLKELL NSTIIYQSITGLYESRKRL----- | 1332 |
| WP_031665337 | 1275 | IAQ---SFV DLMAFNAMGAP-ASFKFFE--ATI--DRK--R-YTNLKELL SSTIIYQSITGLYESRKRL----- | 1332 |
| WP_031669209 | 1275 | IAE---SFV SLKKFNAFGVH-QDFSFFG--TKI--ERK--R-DRKLNELL NSTIIYQSITGLYESRKRL----- | 1332 |
| WP_033920898 | 1275 | IAE---SFV SLKKFNAFGVH-KDFNFFG--TTI--KRK--R-DRKLKELL NSTIIYQSITGLYESRKRL----- | 1332 |
| AKI42028 | 1278 | IAQ---SFV DLMAFNAMGAP-ASFKFFE--ATI--DRK--R-YTNLKELL SSTIIYQSITGLYESRKRL----- | 1335 |
| AKI50529 | 1278 | IAE---SFV SLKKFNAFGVH-KDFNFFG--TTI--KRK--R-DRKLKELL NSTIIYQSITGLYESRKRL----- | 1335 |
| EFR83390 | 723 | IAQ---SFV DLMVFNAMGAP-ASFKFFE--ATI--DRK--R-YTNLKELL SSTIIYQSITGLYESRKRL----- | 780 |
| WP_046323366 | 1275 | IAQ---SFV NLLEFNAMGAP-ASFKYFE--TNI--ERK--R-YNNLKELL NATIIYQSITGLYEARKRL----- | 1332 |
| AKE81011 | 1322 | -AE---NII HLFTLTNLGAP-AAFKYFD--TTI--DRK--R-YTSTKEVL DATLIHQSITGLYETRIDLSQL-- | 1381 |
| CUO82355 | 1273 | -AN----VI QMLIIMHKGPQnGNIIYDDf--NV-gKRIg-R-LNGRTFYL NIEFISQSPIGIYIKKYKL----- | 1333 |
| WP_033162887 | 1275 | -CD----VI QILIIMHAGPMnGNIMYDDf--KF-tNRIg-R-FTHKNIDL KTTFISTSVTGLFSKKYKL----- | 1335 |
| AGZ01981 | 1339 | -AE---NII HLFTLTNLGAP-AAFKYFD--TTI--DRK--R-YTSTKEVL DATLIHQSITGLYETRIDLSQL-- | 1398 |
| AKA60242 | 1306 | -AE---NII HLFTLTNLGAP-AAFKYFD--TTI--DRK--R-YTSTKEVL DATLIHQSITGLYETRIDLSQL-- | 1365 |
| AKS40380 | 1306 | -AE---NII HLFTLTNLGAP-AAFKYFD--TTI--DRK--R-YTSTKEVL DATLIHQSITGLYETRIDLSQL-- | 1365 |
| 4UN5_B | 1310 | -AE---NII HLFTLTNLGAP-AAFKYFD--TTI--DRK--R-YTSTKEVL DATLIHQSITGLYETRIDLSQL-- | 1369 |
| WP_010922251 | 1366 | GGD | 1368 |
| WP_039695303 | 1370 | GEE | 1372 |
| WP_045635197 | 1368 | GED | 1370 |
| 5AXW_A | | --- | |
| WP_009880683 | 1050 | GGD | 1052 |
| WP_010922251 | 1366 | GGD | 1368 |
| WP_011054416 | 1366 | GGD | 1368 |
| WP_011284745 | 1366 | GGD | 1368 |
| WP_011285506 | 1366 | GGD | 1368 |
| WP_011527619 | 1366 | GGD | 1368 |
| WP_012560673 | 1366 | GGD | 1368 |
| WP_014407541 | 1365 | GGD | 1367 |
| WP_020905136 | 1366 | GGD | 1368 |
| WP_023080005 | 1365 | GGD | 1367 |
| WP_023610282 | 1365 | GGD | 1367 |
| WP_030125963 | 1366 | GGD | 1368 |
| WP_030126706 | 1366 | GGD | 1368 |
| WP_031468318 | 1366 | GGD | 1368 |
| WP_032460140 | 1366 | GGD | 1368 |
| WP_032461047 | 1366 | GGD | 1368 |
| WP_032462016 | 1366 | GGD | 1368 |
| WP_032462936 | 1366 | GGD | 1368 |
| WP_032464890 | 1366 | GGD | 1368 |
| WP_033888930 | 1191 | GGD | 1193 |
| WP_038431314 | 1366 | GGD | 1368 |
| WP_038432938 | 1365 | GGD | 1367 |
| WP_038434062 | 1366 | GGD | 1368 |
| BAQ51233 | 1277 | GGD | 1279 |
| KGE60162 | 541 | GGD | 543 |
| KGE60856 | 304 | GGD | 306 |
| WP_002989955 | 1366 | GGD | 1368 |
| WP_003030002 | 1343 | GED | 1345 |
| WP_003065552 | 1371 | GEE | 1373 |
| WP_001040076 | 1368 | GED | 1370 |
| WP_001040078 | 1376 | GED | 1378 |
| WP_001040080 | 1368 | GED | 1370 |
| WP_001040081 | 1368 | GED | 1370 |
| WP_001040083 | 1368 | GED | 1370 |
| WP_001040085 | 1368 | GED | 1370 |
| WP_001040087 | 1368 | GED | 1370 |
| WP_001040088 | 1368 | GGD | 1370 |
| WP_001040089 | 1368 | GED | 1370 |
| WP_001040090 | 1368 | GED | 1370 |
| WP_001040091 | 1368 | GED | 1370 |
| WP_001040092 | 1368 | GED | 1370 |
| WP_001040094 | 1368 | GED | 1370 |
| WP_001040095 | 1368 | GEG | 1370 |
| WP_001040096 | 1368 | GEG | 1370 |
| WP_001040097 | 1368 | GED | 1370 |
| WP_001040098 | 1368 | GED | 1370 |
| WP_001040099 | 1368 | GED | 1370 |
| WP_001040100 | 1368 | GED | 1370 |
| WP_001040104 | 1368 | GED | 1370 |
| WP_001040105 | 1368 | GED | 1370 |
| WP_001040106 | 1368 | GED | 1370 |
| WP_001040107 | 1368 | GED | 1370 |
| WP_001040108 | 1368 | GED | 1370 |
| WP_001040109 | 1368 | GED | 1370 |
| WP_001040110 | 1368 | GED | 1370 |
| WP_015058523 | 1368 | GED | 1370 |
| WP_017643650 | 1368 | GED | 1370 |
| WP_017647151 | 1368 | GED | 1370 |
| WP_017648376 | 1368 | GED | 1370 |
| WP_017649527 | 1368 | GED | 1370 |
| WP_017771611 | 1368 | GED | 1370 |
| WP_017771984 | 1368 | GED | 1370 |
| CFQ25032 | 1368 | GED | 1370 |
| CFV16040 | 1368 | GED | 1370 |
| KLJ37842 | 1368 | GED | 1370 |
| KLJ72361 | 1368 | GGD | 1370 |
| KLL20707 | 1382 | GED | 1384 |
| KLL42645 | 1368 | GED | 1370 |
| WP_047207273 | 1368 | GED | 1370 |
| WP_047209694 | 1368 | GED | 1370 |
| WP_050198062 | 1368 | GED | 1370 |
| WP_050201642 | 1368 | GED | 1370 |
| WP_050204027 | 1368 | GED | 1370 |
| WP_050881965 | 1368 | GED | 1370 |
| WP_050886065 | 1368 | GED | 1370 |
| AHN30376 | 1368 | GED | 1370 |
| EAO78426 | 1368 | GED | 1370 |
| CCW42055 | 1368 | GED | 1370 |
| WP_003041502 | 1384 | GED | 1386 |
| WP_037593752 | 1344 | GED | 1346 |
| WP_049516684 | 1344 | GED | 1346 |
| GAD46167 | 1343 | GED | 1345 |
| WP_018363470 | 1375 | GEE | 1377 |
| WP_003043819 | 1373 | GGD | 1375 |
| WP_006269658 | 1343 | GED | 1345 |
| WP_048800889 | 1363 | GED | 1365 |
| WP_012767106 | 1369 | GGD | 1371 |
| WP_014612333 | 1369 | GGD | 1371 |
| WP_015017095 | 1369 | GGD | 1371 |
| WP_015057649 | 1369 | GGD | 1371 |
| WP_048327215 | 1369 | GGD | 1371 |
| WP_049519324 | 1369 | GGD | 1371 |
| WP_012515931 | 1346 | GEN | 1348 |
| WP_021320964 | 1346 | GEN | 1348 |
| WP_037581760 | 1346 | GEN | 1348 |
| WP_004232481 | 1375 | GEE | 1377 |
| WP_009854540 | 1368 | GEE | 1370 |
| WP_012962174 | 1369 | GEE | 1371 |
| WP_039695303 | 1370 | GEE | 1372 |
| WP_014334983 | 1373 | GEE | 1375 |
| WP_003099269 | 1366 | GGK | 1368 |
| AHY15608 | | --- | |
| AHY17476 | | --- | |
| ESR09100 | 198 | GGK | 200 |
| AGM98575 | | --- | |
| ALF27331 | 1343 | GGD | 1345 |
| WP_018372492 | 1351 | GEN | 1353 |
| WP_045618028 | 1374 | GED | 1376 |
| WP_045635197 | 1368 | GED | 1370 |
| WP_002263549 | 1343 | GGD | 1345 |
| WP_002263887 | 1343 | GGD | 1345 |
| WP_002264920 | 1343 | GGD | 1345 |
| WP_002269043 | 1343 | GGD | 1345 |
| WP_002269448 | 1343 | GGD | 1345 |
| WP_002271977 | 1343 | GGD | 1345 |
| WP_002272766 | 1343 | GGD | 1345 |
| WP_002273241 | 1343 | GGD | 1345 |
| WP_002275430 | 1343 | GGD | 1345 |
| WP_002276448 | 1343 | GGD | 1345 |
| WP_002277050 | 1353 | GGD | 1355 |
| WP_002277364 | 1343 | GGD | 1345 |
| WP_002279025 | 1343 | GGD | 1345 |
| WP_002279859 | 1343 | GGD | 1345 |
| WP_002280230 | 1343 | GGD | 1345 |
| WP_002281696 | 1343 | GGD | 1345 |
| WP_002282247 | 1353 | GGD | 1355 |
| WP_002282906 | 1343 | GGD | 1345 |
| WP_002283846 | 1343 | GGD | 1345 |
| WP_002287255 | 1343 | GGD | 1345 |
| WP_002288990 | 1343 | GGD | 1345 |
| WP_002289641 | 1343 | GGD | 1345 |
| WP_002290427 | 1343 | GGD | 1345 |
| WP_002295753 | 1343 | GGD | 1345 |
| WP_002296423 | 1343 | GGD | 1345 |
| WP_002304487 | 1357 | GGD | 1359 |
| WP_002305844 | 1343 | GGD | 1345 |
| WP_002307203 | 1343 | GGD | 1345 |
| WP_002310390 | 1343 | GGD | 1345 |
| WP_002352408 | 1343 | GGD | 1345 |
| WP_012997688 | 1343 | GGD | 1345 |
| WP_014677909 | 1343 | GGD | 1345 |
| WP_019312892 | 1343 | GGD | 1345 |
| WP_019313659 | 1343 | GGD | 1345 |
| WP_019314093 | 1343 | GGD | 1345 |
| WP_019315370 | 1343 | GGD | 1345 |
| WP_019803776 | 1343 | GGD | 1345 |
| WP_019805234 | 1343 | GGD | 1345 |
| WP_024783594 | 1343 | GGD | 1345 |
| WP_024784288 | 1353 | GGD | 1355 |
| WP_024784666 | 1343 | GGD | 1345 |
| WP_024784894 | 1343 | GGD | 1345 |
| WP_024786433 | 1353 | GGD | 1355 |
| WP_049473442 | 1343 | GGD | 1345 |
| WP_049474547 | 1343 | GGD | 1345 |
| EMC03581 | 1336 | GGD | 1338 |
| WP_000428612 | 1371 | GED | 1373 |
| WP_000428613 | 1369 | GED | 1371 |
| WP_049523028 | 1364 | GEE | 1366 |
| WP_003107102 | 1335 | GGD | 1337 |
| WP_054279288 | 1366 | GGD | 1368 |
| WP_049531101 | 1374 | GED | 1376 |
| WP_049538452 | 1374 | GED | 1376 |
| WP_049549711 | 1376 | GED | 1378 |
| WP_007896501 | 1372 | GGD | 1374 |
| EFR44625 | 1324 | GGD | 1326 |
| WP_002897477 | 1368 | GEE | 1370 |
| WP_002906454 | 1375 | GED | 1377 |
| WP_009729476 | 1369 | GED | 1371 |
| CQR24647 | 1359 | GGE | 1361 |
| WP_000066813 | 1373 | GED | 1375 |
| WP_009754323 | 1369 | GED | 1371 |
| WP_044674937 | 1362 | GGD | 1364 |
| WP_044676715 | 1364 | GGD | 1366 |
| WP_044680361 | 1364 | GGD | 1366 |
| WP_044681799 | 1362 | GGD | 1364 |
| WP_049533112 | 1384 | GED | 1386 |
| WP_029090905 | | --- | |
| WP_006506696 | | --- | |
| AIT42264 | 1366 | GGD | 1389 |
| WP_034440723 | | --- | |
| AKQ21048 | 1366 | GGD | 1384 |
| WP_004636532 | 1330 | -ED | 1332 |
| WP_002364836 | 1336 | -VD | 1337 |
| WP_016631044 | 1287 | -VD | 1288 |
| EMS75795 | 1077 | GEQ | 1079 |
| WP_002373311 | 1336 | -VD | 1337 |
| WP_002378009 | 1336 | -VD | 1337 |
| WP_002407324 | 1336 | -VD | 1337 |
| WP_002413717 | 1336 | -VD | 1337 |
| WP_010775580 | 1338 | -VD | 1339 |
| WP_010818269 | 1336 | -VD | 1337 |
| WP_010824395 | 1336 | -VD | 1337 |
| WP_016622645 | 1336 | -VD | 1337 |
| WP_033624816 | 1336 | -VD | 1337 |
| WP_033625576 | 1336 | -VD | 1337 |
| WP_033789179 | 1336 | -VD | 1337 |
| WP_002310644 | | --- | |
| WP_002312694 | | --- | |
| WP_002314015 | | --- | |
| WP_002320716 | | --- | |
| WP_002330729 | | --- | |
| WP_002335161 | | --- | |
| WP_002345439 | | --- | |
| WP_034867970 | 1334 | GEQ | 1336 |
| WP_047937432 | | --- | |
| WP_010720994 | 1334 | GEQ | 1336 |
| WP_010737004 | 1334 | GEQ | 1336 |
| WP_034700478 | 1334 | GEQ | 1336 |
| WP_007209003 | | --- | |
| WP_023519017 | 1327 | GER | 1330 |
| WP_010770040 | 1333 | -VD | 1334 |
| WP_048604708 | 1329 | -GD | 1330 |
| WP_010750235 | 1337 | GVQ | 1339 |
| AII16583 | 1405 | GGD | 1424 |
| WP_029073316 | | --- | |
| WP_031589969 | | --- | |
| KDA45870 | | --- | |
| WP_039099354 | | --- | |
| AKP02966 | | --- | |
| WP_010991369 | 1333 | -DD | 1334 |
| WP_033838504 | 1333 | -DD | 1334 |
| EHN60060 | 1336 | -DD | 1337 |
| EFR89594 | 1102 | -DD | 1103 |
| WP_038409211 | 1333 | -ED | 1334 |
| EFR95520 | 952 | -ED | 953 |
| WP_003723650 | 1333 | -DD | 1334 |
| WP_003727705 | 1333 | -DD | 1334 |
| WP_003730785 | 1333 | -DD | 1334 |
| WP_003733029 | 1333 | -DN | 1334 |
| WP_003739838 | 1333 | -DG | 1334 |
| WP_014601172 | 1333 | -DD | 1334 |
| WP_023548323 | 1333 | -DS | 1334 |
| WP_031665337 | 1333 | -DD | 1334 |
| WP_031669209 | 1333 | -DN | 1334 |
| WP_033920898 | 1333 | -DS | 1334 |
| AKI42028 | 1336 | -DD | 1337 |
| AKI50529 | 1336 | -DS | 1337 |
| EFR83390 | 781 | -DD | 782 |
| WP_046323366 | 1333 | -DD | 1334 |
| AKE81011 | 1382 | GGD | 1400 |
| CUO82355 | | --- | |
| WP_033162887 | | --- | |
| AGZ01981 | 1399 | GGD | 1417 |
| AKA60242 | 1366 | GGD | 1368 |
| AKS40380 | 1366 | GGD | 1376 |
| 4UN5_B | 1370 | GGD | 1372 |

[0315] Additional suitable Cas9 sequences in which amino acid residues homologous to residues 10, 122, 137, 182, 262, 294, 409, 480, 543, 660, 694, 840, 1219, and/or 1329 of SEQ ID NO: 9 can be identified are known to those of skill in the art. See, e.g., Supplementary Table S2 and Supplementary Figure S2 of Fonfara et al., Phylogeny of Cas9 determines functional exchangeability of dual-RNA and Cas9 among orthologous type II CRISPR-Cas systems, Nucl. Acids Res. 2013, doi: 10.1093/nar/gkt1074, which are incorporated herein by reference in their entirety. Cas9 variants of the sequences provided herein or known in the art comprising one or more mutations, e.g., at least one, at least two, at least three, at least four, at least five, at least six, or at least seven mutations as provided herein, e.g., of one or more amino acid residue that is homologous to amino acid residue 10, 122, 137, 182, 262, 294, 409, 480, 543, 660, 694, 840, 1219, and/or 1329 in SEQ ID NO: 9 are provided by this disclosure, for example, Cas9 variants comprising a A262T, K294R, S409I, E480K, E543D, M694I, and/or E1219V mutation.

### Example 4: Evolution of Cas9 with Broadened PAM Specificities

[0316] By evolving S. pyogenes Cas9 on a NNN PAM library using PACE, Cas9s with broadened PAM specificities have been evolved with higher activities for many non-canonical PAMs. Such a Cas9 still retains its native DNA binding and cutting activity and can be utilized with all of the current tools available. It has been hypothesized that by modulating Cas9's interactions with the DNA, the PAM specificity of Cas9 can be modified and expanded. Other Cas9s such as Staphylococcus aureus could also be engineered to change and expand their PAM specificity by such a method. Methods to modulate DNA binding such as targeted mutagenesis of the Cas9 protein, fusions to DNA-binding proteins, and the use of multiple Cas9 proteins tethered to each other could also expand the PAMs that can be targeted.

[0317] Cas9 Evolution.

[0318] After evolution using overnight propagation of the phage with the mutagenesis plasmid (MP), the resultant phages containing mutations, discussed above, in PACE were used. Twenty-four individual phages were sequenced from the PACE run. Mutations found in the Cas9 gene are documented in Table 3 below. The Cas9 gene containing these mutations was cloned out of the phage and into plasmids to test both DNA binding and cutting activity.

TABLE 3
Cas9 mutations

| | | | | | | | | | | | | |
|---|---|---|---|---|---|---|---|---|---|---|---|---|
| pJH306 | | | | | | | | | | | | |
| (WT dCas9- VPR) | | | | | | | | | | | | |
| pJH407 | | | | | | | | | | | | |
| (WT Cas9) | | | | | | | | | | | | |
| pJH562 | | | | | | E480K | E543D | | E1219V | | | |
| (dCas9-VPR) | | | | | | | | | | | | |
| pJH599 | A262T | | | | S409I | E480K | E543D | M694I | E1219V | | | |
| (dCas9-VPR) | | | | | | | | | | | | |
| pJH600 | | | K294R | | | E480K | E543D | | E1219V | | Q1256K | L1362P |
| (dCas9-VPR) | | | | | | | | | | | | |
| pJH601 | A262T | | | | S409I | E480K | E543D | M694I | E1219V | | | |
| (dCas9-VPR) | | | | | | | | | | | | |
| pJH602 | | | K294R | | | E480K | E543D | | E1219V | | Q1256K | |
| (dCas9-VPR) | | | | | | | | | | | | |
| pJH603 | A262T | | | | S409I | E480K | E543D | M694I | E1219V | | | |
| (dCas9-VPR) | | | | | | | | | | | | |
| pJH604 | | S267G | K294R | | | E480K | E543D | | E1219V | N1224K | Q1256K | |
| (dCas9-VPR) | | | | | | | | | | | | |
| pJH605 | A262T | | | F405I | S409I | E480K | E543D | M694I | E1219V | | | |
| (dCas9-VPR) | | | | | | | | | | | | |
| pJH760 | A262T | | | | S409I | E480K | E543D | M694I | E1219V | | | |
| (pJH599 Minus | | | | | | | | | | | | |
| VPR, Nuclease | | | | | | | | | | | | |
| Positive) | | | | | | | | | | | | |

[0319] GFP Activation in Human Cell Culture.

[0320] Testing was performed on a reporter with a GFP reporter activated by dCas9-VPR. Testing was performed on 5′-NGG-3′ PAM first (FIGS. 4A and 4B) and then with a library of GFP reporters all containing the same Cas9 target site, but with NNN at the PAM position (FIGS. 5A and 5B). In this testing, dCas9-VPR was found to activate the GFP signal. Wild-type Cas9 with no mutations (pJH306), Cas9 evolved from overnight propagation (pJH562), and Cas9 evolved from PACE (pJH599-pJH605) were all tested. Mutations for each Cas9 are documented in Table 3 above.

[0321] dCas9-VPR on all 64 PAM Sequences.

[0322] pJH306 (WT dCas9-VPR) and pJH599 (WT dCas9-VPR with mutations A262T, S409I, E480K, E543D, M694I, and E1219V) were tested on all 64 PAM sequences (FIG. 6). dCas9-VPR was used to activate GFP as before and a different reporter plasmid was used for each well to ascertain the activation efficiency for all 64 different PAM sequences. The mean GFP fluorescence was measured for all transfected cells, as gated by iRFP signal. pJH599 showed either improved or similar levels of activation as compared to pJH306 for all PAM sequences.

[0323] In Vitro Cutting Assay.

[0324] The ability of expressed and purified WT Cas9 (WT) and Cas 9 with an E1219V mutation (1) to cut DNA with different PAMs was tested (FIG. 7). Cas9 was incubated with dsDNA containing the target site. Cutting was measured by running the DNA on a gel to compare the amount of uncut product to the amount of cut products, which run faster due to their smaller size. The E1219V mutation was found to increase Cas9 cutting activity on non-canonical PAMs while maintaining activity on 5′-NGG-3′ PAMs.

[0325] Evolving Different Systems.

[0326] In addition to S. pyogenes Cas9 evolution, other Cas9 systems such as S. aureus, S. thermophilus, N. meningitidis, and T. denticola, etc. can be evolved to modify and expand their PAM specificities. The data indicates that, by using a similar system to the S. pyogenes Cas9 evolution, a phage containing the S. aureus Cas9 can also be evolved to expand its PAM specificity.

[0327] Modulating PAM Specificity.

[0328] By mutating neutral and negatively charged amino acids to positively charged amino acids, Cas9 could be modified to expand the PAMs that can be targeted. Generally, incorporating mutations into Cas9 proteins that generate a net increase in positive charge may increase the affinity of Cas9 to bind DNA. In combination with the Cas9 mutations provided herein, additional residues that could be mutated for increased PAM targeting in S. pyogenes Cas9 further include ones that have been identified to change the PAM specificity (D1135, G1218, R1333, R1335, T1337)³⁸ and residues that can increase Cas9 activity (S845 and L847)³⁷. Residues that increase Cas9 specificity such as the mutations of arginine, histidine, and lysine to alanine previously identified³⁷ and the mutations of asparagine, arginine, and glutamine to alanine as previously identified³⁹ could lead to lower tolerability for non-canonical PAMs as these mutations presumably decrease the interactions between the Cas9 and DNA.

[0329] Fusions to Modulate PAM Specificity.

[0330] Programmable DNA-binding proteins such as zinc-finger domains, TALEs, and other Cas9 proteins could be fused to Cas9 to improve the ability to target nucleotide sequences having canonical or non-canonical PAMs, for example to increase activity, specificity or efficiency. A nuclease-null dCas9 could be fused to a nuclease active Cas9 to increase the ability of the nuclease active Cas9 to target different PAM sequences. One example of a nuclease-null dCas9 fused to a nuclease active Cas9 is shown in FIG. 8. Such fusions can be useful for improving the ability to target nucleotide sequences having canonical or non-canonical PAMs. The Cas9s could either be from the same species or from different species. Furthermore, both Cas9s could be nuclease-null dCas9, and could be further fused to effector proteins such as VP64, VP64-p65-Rta, FokI, GFP and other fluorescent proteins, deaminases, or any of the effector proteins provided herein.

[0331] Using Cas9 to Localize Other Nucleases and Other DNA-Binding Proteins.

[0332] Cas9 can also be used to overcome the native binding specificity of other proteins by localizing them to their DNA targets. DNA nucleases, recombinases, deaminases, and other effectors often have a native DNA specificity. Cas9 can be fused to these proteins to overcome and expand their native DNA specificities. gRNAs will target the Cas9 adjacent to the DNA effector's target site and will help to localize them to their target site.

[0333] dCas9-VPR on NNNNN PAM Library.

[0334] To test that the evolved Cas9s had not picked up specificity in the 4th and 5th PAM positions, dCas9-VPR on a NNNNN PAM library was tested. As seen with the NNN library, most of the constructs (e.g., pJH562, pJ559, pJH600, pJH601, pJH602, pJH603, and pJH605) showed improved activity. pJH599 consistently showed improvement in both the percentage of cells that showed GFP activation (FIG. 9A) and the mean fluorescence of those cells that showed GFP activation (FIG. 9B).

[0335] Cas9 Gfp Cutting.

[0336] The WT Cas9, pJH407, was compared with a nuclease-positive evolved Cas9, pJH760 (FIG. 10). pJH760 contained the same mutations as pJH599 but without the D10A and H480A nuclease-inactivating mutations, and without the VPR fusion. A genomically integrated GFP gene was cut by Cas9 and the activity was measured by the loss of GFP signal in cells. On a site with 5′-NGG-3′ PAM, pJH407 and pJH760 showed comparable activity. On a site with GAT PAM, pJH760 showed a significant increase in activity as compared to pJH407.

### Example 5 Cas9:DNA Editing Enzyme Fusion Proteins

[0337] This disclosure further provides Cas9 fused with a DNA editing enzyme for the targeted editing of DNA sequences. FIG. 11 illustrates double stranded DNA substrate binding by DNA editing enzyme-dCas9:sgRNA complexes. The DNA editing enzyme shown is a deaminase. The structures according to FIG. 11 are identified in these sequences (36 bp: underlined, sgRNA target sequence: bold; PAM: boxed; 21 bp: italicized).

### Example 6 PAM Depletion Assay

[0338] In E. coli, a library of PAM sequences are encoded in a plasmid that also contains an antibiotic gene. If the Cas9 can cut the PAM sequences on the plasmid, the plasmid is not replicated and is lost; only plasmids that are uncut remain the population. The plasmids that were cut by the Cas9 can be determined by sequencing the initial plasmid population and the final plasmid population through high throughput sequencing. The proportion of the library consisting of each PAM sequence was obtained by dividing the number of reads containing the PAM sequence by the total number of reads. The depletion score was then calculated by dividing the proportion of the library containing the PAM section before the selection by the proportion of the library containing the PAM sequence after selection. Higher depletion scores signify higher cutting activity by the Cas9 of that particular PAM sequence. The results of the PAM depletion assay are shown in FIG. 12.

[0339] A number of PAM sequences that were not cut with the wild-type Cas9 were cut with the evolved Cas9 (xCas9 v1.0, pJH760). Notably, all PAM sequences of the form NGN and NNG, as well as GAA and GAT showed a depletion greater than 10-fold with the xCas9. A single G in either the second or third PAM position could be sufficient for cutting with the newly evolved Cas9, opening up the sequence space significantly for the target sites that can be targeted using Cas9. The PAM depletion scores are given in Table 4.

TABLE 4
PAM Depletion Scores

| PAM | | xCas9 |
|---|---|---|
| Sequence | WT Cas9 | v1.0 |
| TCG | 0.96 | 32.75 |
| CAG | 12.63 | 32.01 |
| GCG | 1.38 | 31.14 |
| ACG | 1.12 | 30.15 |
| TGG | 18.99 | 30.13 |
| TGT | 1.01 | 28.37 |
| GGC | 11.78 | 28.17 |
| AGA | 1.25 | 27.80 |
| GAG | 19.47 | 27.71 |
| GGT | 12.22 | 27.59 |
| CGA | 1.27 | 27.53 |
| CGT | 0.97 | 27.30 |
| TGA | 1.72 | 27.02 |
| GGA | 16.03 | 26.90 |
| AGG | 17.80 | 26.19 |
| TAG | 9.54 | 25.98 |
| CGC | 1.76 | 25.88 |
| AGT | 0.97 | 24.88 |
| CGG | 19.03 | 24.77 |
| AAG | 15.40 | 24.16 |
| GTG | 3.76 | 23.71 |
| ATG | 1.26 | 23.48 |
| GGG | 17.59 | 23.01 |
| TGC | 1.71 | 23.00 |
| TTG | 0.98 | 22.15 |
| GAA | 1.04 | 20.96 |
| AGC | 1.43 | 16.85 |
| GAT | 1.02 | 16.09 |
| CTG | 1.29 | 13.88 |
| CCG | 1.02 | 11.86 |
| CAT | 0.99 | 5.75 |
| CAA | 1.00 | 5.28 |
| GAC | 0.98 | 3.96 |
| TAA | 0.97 | 1.90 |
| AAA | 1.02 | 1.81 |
| TAT | 0.95 | 1.56 |
| CAC | 1.01 | 1.48 |
| GTA | 0.94 | 1.42 |
| AAT | 0.98 | 1.39 |
| GCA | 0.98 | 1.22 |
| ACA | 0.95 | 1.13 |
| AAC | 1.08 | 1.09 |
| TAC | 0.92 | 0.95 |
| ATA | 1.04 | 0.94 |
| GTC | 0.99 | 0.92 |
| GCT | 0.99 | 0.87 |
| TCA | 0.94 | 0.84 |
| CTA | 0.95 | 0.83 |
| GCC | 0.99 | 0.82 |
| GTT | 0.97 | 0.81 |
| TCC | 0.98 | 0.80 |
| ACC | 0.96 | 0.80 |
| CTC | 0.92 | 0.80 |
| CCA | 0.97 | 0.79 |
| CCC | 0.95 | 0.79 |
| CTT | 0.96 | 0.79 |
| ATC | 0.96 | 0.78 |
| CCT | 0.94 | 0.78 |
| ATT | 0.93 | 0.77 |
| ACT | 0.89 | 0.77 |
| TTT | 0.94 | 0.77 |
| TCT | 0.95 | 0.77 |
| TTC | 0.96 | 0.76 |
| TTA | 0.94 | 0.76 |

### Example 7. GFP Cutting Mammalian Cells

[0340] Wild-type or evolved Cas9 and gRNAs were transfected into mammalian cells containing a genomically integrated GFP gene. Different gRNAs targeted different sites with different PAM sequences, such that cutting of the GFP by Cas9 would lead to a loss of the GFP signal. The GFP signal was quantified after five days with flow cytometry. As shown in FIG. 13, evolved Cas9 cut GFP in mammalian, in line with the results in the GFP activation assay and in the PAM depletion assay. High throughput sequencing around the cut site verified the results seen with the flow cytometer; the indels were proportional to the cutting percentage seen with the flow cytometer.

### Example 8: Further Evoluation of the HHH Library

[0341] As SpCas9 has a preference for the G residues at the second and third base, evolution was continued using the end point from the last evolution on a HHH (H=A, C, or T) PAM library. After evolution, 13 colonies were sequenced and a number of new mutations were identified. Three mutations, the E1219V, E480K, and E543D mutations were found in all the clones. A number of the clones either had the S267G/K294R/Q1256K mutations or the A262T/S409I mutations but those mutations were never seen together, suggesting that the clones had taken two divergent paths along the evolutionsary landscape. The new mutations are given in Table 5.

TABLE 5
New Mutations

| HHH | HHH | HHH | HHH | HHH | HHH | HHH | HHH | HHH | HHH | HHH | HHH | HHH |
|---|---|---|---|---|---|---|---|---|---|---|---|---|
| #1 | #2 | #3 | #4 | #5 | #6 | #7 | #8 | #9 | #10 | #11 | #12 | #13 |
| (xCas9 | (xCas9 | (xCas9 | (xCas9 | (xCas9 | (xCas9 | (xCas9 | (xCas9 | (xCas9 | (xCas9 | (xCas9 | (xCas9 | (xCas9 |
| 2.0) | 2.1) | 2.2) | 2.3) | 2.4) | 2.5) | 2.6) | 2.7) | 2.8) | 2.9) | 2.10) | 2.11) | 2.12) |
| | | D23N | | | | | | | | | | |
| | | E108G | | | | | | | | | | |
| R115H | | | | | | | | | | | | |
| K141Q | | | | | | | | | | | | |
| | | | | | | | | | D180N | | | |
| | | | | | | | | P230S | | | | P230S |
| | | | D257N | | | | | | | | | |
| | | A262T | | | | A262T | | | | A262T | | |
| S267G | S267G | | S267G | | S267G | | | S267G | | | S267G | S267G |
| | | | | | | | | | D284N | | | |
| K294R | K294R | | K294R | | K294R | | K294R | K294R | | | K294R | K294R |
| | | | | | | R324L | | | | | | |
| Q394H | | | | | | | | | | | | |
| | | S409I | | S409I | | S409I | | | | S409I | | |
| | | | | L455F | | | | | | | | |
| | | | T466A | | | | | | | | | |
| | | | | | | | | | T474I | | | |
| E480K | E480K | E480K | E480K | E480K | E480K | E480K | E480K | E480K | E480K | E480K | E480K | E480K |
| E543D | E543D | E543D | E543D | E543D | E543D | E543D | E543D | E543D | E543D | E543D | E543D | E543D |
| | | | | | | | | | K554R | | | |
| | | | | R654L | | | | | | | | |
| | | M694I | | | | M694I | | | | M694I | | |
| | | | | | | | A711E | | | | | |
| | | L727P | | | | | | | | | | |
| | | | | | | | | | M763I | | | |
| | | | I1063V | | | | | | | | | |
| | | | | V1100I | | | | | | | | |
| E1219V | E1219V | E1219V | E1219V | E1219V | E1219V | E1219V | E1219V | E1219V | E1219V | E1219V | E1219V | E1219V |
| | | | | | | | | | K1244N | | | |
| Q1256K | Q1256K | | Q1256K | | Q1256K | | Q1256K | Q1256K | | | Q1256K | Q1256K |
| | | K1289Q | | | | | | | | | | |
| | | | | A1323S | | | | | | | | |

### Example 9: Further Evolved Cas9 Proteins for Gene Editing

[0342] pJH760, described in Example 6, was tested in the PAM depletion assay on a number of new targets. Four new targets were selected: re2 (GGGGCCACTAGGGACAGGAT (SEQ ID NO: 314)), a synthetic target previously used for GFP activation in mammalian cells; VEGF (GGGTGGGGGGAGTTTGCTCC (SEQ ID NO: 315)), a target within the VEGF gene, CLTA (GCAGATGTAGTGTTTCCACA (SEQ ID NO: 316)), a target within the CLTA gene; and CCR5D (TCACTATGCTGCCGCCCAGT (SEQ ID NO: 317)), a target within the CCR5D gene. The results of the PAM depletion assay are given in FIGS. 14 to 17. It was found that, in addition to the canonical NGG sequence, PAM depletion demonstrates cutting for most NGN and some NNG sequences as well.

[0343] The HHH PAM library was further evolved using the end point from the last evolution on a HHH (H=A, C, or T) PAM library. After evolution, 13 colonies were sequenced and a number of new mutations were identified. Three mutations, the E1219V, E480K, and E543D mutations were found in all the clones. A number of the clones either had the K294R/Q1256K mutations or the A262T/S409I mutations but those mutations were never seen together, suggesting that the clones had taken two divergent paths along the evolutionsary landscape. The new mutations are given in Tables 8 and 9 below.

[0344] As expected, variation in activity was seen with different targets. The PAM depletion assay scores are given in Table 10. NGN consistently showed cutting activity with some targets. Variation was seen amoungst the xCas9 3.x mutants in terms of which mutant had the best activity. Of note, xCas9 3.3 contained the K294R/Q1256K series of mutations, while the other three mutants (3.6, 3.7, and 3.8) contained the A262T/S409I series of mutations. xCas9 3.6 and 3.7 outperformed 3.8. While 3.3 seemed to have the highest activity for most cases, 3.6 and 3.7 performed better on certain PAM sequences. The results of the PAM depletion assays for three of the new targets described above are given in FIGS. 18 to 20.

[0345] A NNNNN PAM depletion library was constructed. It was assayed to examine any fourth or fifth base specificity. Initial results of the PAM depletion assay show that there is no preference at the fourth and fifth base as expected.

[0346] In summary, E1219V was found to be one of the earliest mutations that fixed in the evoluation. It is close to the PAM sequence in the crystal structure. E480K and E543D were also seen in all of the clones from the early stages of the evolution, and may be important. K294R/Q1256K and A262T/S409I seem to be two divergent paths, and may be important. Their PAM sequence profiles seem to be slightly different, which implies their importance relative to PAM activity determination.

TABLE 6
Diseases/disorders containging T to C Changes.The table includes human gene
mutations that may be corrected by changing a cytosine (C) to a thymine (T). The gene
name, gene symbol,and Gene ID are indicated.

| SEQ | | | | |
|---|---|---|---|---|
| ID | | Gene | Gene | |
| NO: | Name | ID | Symbol | Flanks |
| 674 | NM_000410.3(HFE): c.314T > C | 3077 | HFE | [′ATGTTCACTGTTGACTTCTGGACTAYTATGG |
| | (p.Ile105Thr) | | | AAAATCACAACCACAGCAAG′] |
| 675 | NM_144631.5(ZNF513): c.1015T > | 130557 | ZNF513 | [′GCTGGGAGCTGCCATGTGTGGGCGCYGCAT |
| | C (p.Cys339Arg) | | | GCGAGGAGAGGCTGGAGGGGG′] |
| 676 | NM_001199107.1(TBC1D24): c. | 57465 | TBC1D24 | [′CGTGGCGCTGGCCATCCTCAAGTTCYTCCAC |
| | 751T > C (p.Phe251Leu) | | | AAGGTGAGGGCCGGGCAGCC′] |
| 677 | NM_001708.2(OPN1SW): c.640T > | 611 | OPN1SW | [′CATCTTCTGCTTCATTGTGCCTCTCBCCCTCA |
| | C (p.Ser214Pro) | | | TCTGCTTCTCCTACACTCA′] |
| 678 | NM_000235.3(LIPA): c.599T > C | 3988 | LIPA | [′AAAAGGATTAAAATGTTTTTTGCCCYGGGTC |
| | (p.Leu200Pro) | | | CTGTGGCTTCCGTCGCCTTC′] |
| 679 | NM_000071.2(CBS): c.833T > C | 875 | CBS | [′CTGAAGCCGCGCCCTCTGCAGATCAYTGGG |
| | (p.Ile278Thr) | | | GTGGATCCCGAAGGGTCCATC′] |
| 680 | NM_000071.2(CBS): c.1616T > C | 875 | CBS | [′TTCGGGGTGGTCACCGCCATTGACTYGCTGA |
| | (p.Leu539Ser) | | | ACTTCGTGGCCGCCCAGGAG′] |
| 681 | NM_033409.3(SLC52A3): c.670T > | 113278 | SLC52A3 | [′CGCCCACTTCTCACCCCTGGTCTTCYTCCTCC |
| | C (p.Phe224Leu) | | | TCCTATCCATCATGATGGC′] |
| 682 | NM_033409.3(SLC52A3): c.1238T > | 113278 | SLC52A3 | [′CTTTTCAGCGGCTGCCTCAGTTACGYCAAGG |
| | C (p.Val413Ala) | | | TGATGCTGGGCGTGGTCCTG′] |
| 683 | NM_000274.3 (OAT): c.163T > C | 4942 | OAT | [′GGAATATAAGTATGGTGCACACAACYACCA |
| | (p.Tyr55His) | | | TCCTTTACCTGTAGCCCTGGA′] |
| 684 | NM_000274.3(OAT): c.1205T > C | 4942 | OAT | [′TGTCTACGACTTCGAGATAATGGACYTCTGG |
| | (p.Leu402Pro) | | | CCAAGCCAACCCATGGCGAC′] |
| 685 | NM_000274.3(OAT): c.1180T > C | 4942 | OAT | [′TTTAGATTGGGATGCTTGGAAGGTGYGTCTA |
| | (p.Cys394Arg) | | | CGACTTCGAGATAATGGACT′] |
| 686 | NM_001385.2(DPYS): c.1078T > | 1807 | DPYS | [′TGTTGAAGATCGGATGTCCGTAATAYGGGA |
| | C (p.Trp360Arg) | | | AAAAGGCGTGGTGGGTTTCAC′] |
| 687 | NM_000027.3(AGA): c.916T > C | 175 | AGA | [′TCCAGAATTCTTTGGGGCTGTTATAYGTGCC |
| | (p.Cys306Arg) | | | AATGTGACTGGAAGTTACGG′] |
| 688 | NM_000027.3(AGA): c.214T > C | 175 | AGA | [′GTGTGAGAGAGAGCAGTGTGACGGCYCTGT |
| | (p.Ser72Pro) | | | AGGCTTTGGAGGAAGTCCTGA′] |
| 689 | NM_000398.6(CYB5R3): c.382T > | 1727 | CYB5R3 | [′CAAGTTTCCCGCTGGAGGGAAGATGYCTCA |
| | C (p.Ser128Pro) | | | GTACCTGGAGAGCATGCAGAT′] |
| 690 | NM_000398.6(CYB5R3): c.446T > | 1727 | CYB5R3 | [′GAGTTCCGGGGCCCCAGTGGGCTGCYGGTC |
| | C (p.Leu149Pro) | | | TACCAGGGCAAAGGTGATTCG′] |
| 691 | NM_000398.6(CYB5R3): c.610T > | 1727 | CYB5R3 | [′GAAGGACCCTGATGACCACACTGTGYGCCA |
| | C (p.Cys204Arg) | | | CCTGCTCTTTGCCAACCAGGT′] |
| 692 | NM_000398.6(CYB5R3): c.218T > | 1727 | CYB5R3 | [′CCGTCACCCCAGCACATCCTGGGCCYCCCTG |
| | C (p.Leu73Pro) | | | TCGGTGAGTCACGCCCCTGC′] |
| 693 | NM_000552.3(VWF): c.4883T > C | 7450 | VWF | [′CCTGGAGACATCCAGGTGGTGCCCAYTGGA |
| | (p.Ile1628Thr) | | | GTGGGCCCTAATGCCAACGTG′] |
| 694 | NM_000552.3(VWF): c.4837T > C | 7450 | VWF | [′CTACATGGTCACCGGAAATCCTGCCYCTGAT |
| | (p.Ser1613Pro) | | | GAGATCAAGAGGCTGCCTGG′] |
| 695 | NM_000552.3(VWF): c.3814T > C | 7450 | VWF | [′GGAACCGCCGTTGCACGATTTCTACBGCAGC |
| | (p.Cys1272Arg) | | | AGGCTACTGGACCTGGTCTT′] |
| 696 | NM_000552.3(VWF): c.8317T > C | 7450 | VWF | [′CAACGATGTGCAGGACCAGTGCTCCYGCTG |
| | (p.Cys2773Arg) | | | CTCTCCGACACGGACGGAGCC′] |
| 697 | NM_000552.3(VWF): c.3445T > C | 7450 | VWF | [′TGAGTGTGAGTGGCGCTATAACAGCYGTGC |
| | (p.Cys1149Arg) | | | ACCTGCCTGTCAAGTCACGTG′] |
| 698 | NM_000552.3(VWF): c.3178T > C | 7450 | VWF | [′GAAGCAGACGATGGTGGATTCCTCCYGTAG |
| | (p.Cys1060Arg) | | | AATCCTTACCAGTGACGTCTT′] |
| 699 | NM_001042492.2(NF1): c.5858T > | 4763 | NF1 | [′TGTTTGGAATACATGACTCCATGGCYGTCAA |
| | C (p.Leu1953Pro) | | | ATCTAGTTCGTTTTTGCAAG′] |
| 700 | NM_000267.3(NF1): c.1523T > C | 4763 | NF1 | [′ATTCATGCAGATCCAAAGCTCTTGCYTTGTG |
| | (p.Leu508Pro) | | | TAAGTATTTTTTTATGAAAT′] |
| 701 | NM_000267.3(NF1): c.6200T > C | 4763 | NF1 | [′ATTTTAGCACGCTACATGCTGATGCYGTCCT |
| | (p.Leu2067Pro) | | | TCAACAATTCCCTTGATGTG′] |
| 702 | NM_000267.3(NF1): c.1070T > C | 4763 | NF1 | [′CTGTTGGGGTTTTTATAGAACCTGCYTTTTA |
| | (p.Leu357Pro) | | | ATCCAAGTAAGCCATTCTCA′] |
| 703 | NM_000267.3(NF1): c.3728T > C | 4763 | NF1 | [′TCTCAGGATGAACTAGCTCGAGTTCYGGTTA |
| | (p.Leu1243Pro) | | | CTCTGTTTGATTCTCGGCAT′] |
| 704 | NM_000308.2(CTSA): c.247T > C | 5476 | CTSA | [′CTCCGGCTCCAAGCACCTCCACTACYGGTCT |
| | (p.Trp83Arg) | | | GCCGCCCTGCCTTCTGGGCG′] |
| 705 | NM_001127695.1(CTSA): c.707T > | 5476 | CTSA | [′ATCTCCTACAGGCTTTGGTCTTCTCYCCAGA |
| | C (p.Leu236Pro) | | | CCCACTGCTGCTCTCAAAAC′] |
| 706 | NM_000308.2(CTSA): c.1271T > | 5476 | CTSA | [′GATGTAGACATGGCCTGCAATTTCAYGGGG |
| | C (p.Met424Thr) | | | GATGAGTGGTTTGTGGATTCC′] |
| 707 | NM_000405.4(GM2A): c.412T > | 2760 | GM2A | [′GCGTACCTATGGGCTTCCTTGCCACYGTCCC |
| | C (p.Cys138Arg) | | | TTCAAAGAAGTAAGTACTTA′] |
| 708 | NM_001165974.1(UROC1): c.209T > | 131669 | UROC1 | [′CCAGAGTTTGCCCAGGAGCTGCAACYGTAC |
| | C (p.Leu70Pro) | | | GGACACATCTACATGTACCGG′] |
| 709 | NM_003730.4(RNASET2): c.550T > | 8635 | RNASET2 | [′ATATGGAGTGATACCCAAAATCCAGYGCCT |
| | C (p.Cys184Arg) | | | TCCACCAAGCCAGGTTAGACA′] |
| 710 | NM_199069.1(NDUFAF3): c.2T > | 25915 | NDUFAF3 | [′GACTTCGCCGCGCGTTGGTCAGCCAYGGCC |
| | C (p.Met1Thr) | | | ACCGCTCTCGCGCTACGTAGC′] |
| 711 | NM_178012.4(TUBB2B): c.514T > | 347733 | TUBB2B | [′CATGAACACCTTCAGCGTCATGCCCYCACCC |
| | C (p.Ser172Pro) | | | AAGGTGTCAGACACGGTGGT′] |
| 712 | NM_178012.4(TUBB2B): c.683T > | 347733 | TUBB2B | [′CCCACCTACGGGGACCTCAACCACCYGGTG |
| | C (p.Leu228Pro) | | | TCGGCCACCATGAGCGGGGTC′] |
| 713 | NM_178012.4(TUBB2B): c.793T > | 347733 | TUBB2B | [′CATGGTGCCCTTCCCTCGCCTGCACYTCTTC |
| | C (p.Phe265Leu) | | | ATGCCCGGCTTCGCGCCCCT′] |
| 714 | NM_000110.3(DPYD): c.85T > C | 1806 | DPYD | [′TCGAACACAAACTCATGCAACTCTGYGTTCC |
| | (p.Cys29Arg) | | | ACTTCGGCCAAGAAATTAGA′] |
| 715 | NM_133459.3(CCBE1): c.520T > | 147372 | CCBE1 | [′CATCCGGGAAGATGATGGGAAGACAYGTAC |
| | C (p.Cys174Arg) | | | CAGGGGAGACAAATATCCCAA′] |
| 716 | NM_000035.3(ALDOB): c.442T > | 229 | ALDOB | [′GAAAGATGGTGTTGACTTTGGGAAGYGGCG |
| | C (p.Trp148Arg) | | | TGCTGTGCTGAGGATTGCCGA′] |
| 717 | NM_000320.2(QDPR): c.106T > C | 5860 | QDPR | [′AACCAAAGCTGTTTTCTCCTTCCAGYGGGTT |
| | (p.Trp36Arg) | | | GCCAGCGTTGATGTGGTGGA′] |
| 718 | NM_173560.3(RFX6): c.380 + 2T > | 222546 | RFX6 | [′GCAGACACAGCTCACGCTGCAGTGGYGAGA |
| | C | | | CTCGCCCGCAGGGTACACTGA′] |
| 719 | NM_173560.3(RFX6): c.649T > C | 222546 | RFX6 | [′AAAATGTACTAATTTTTTAAGGTTTYCTGGA |
| | (p.Ser217Pro) | | | AGCAAGCTAAAGAATGAGGT′] |
| 720 | NM_000037.3(ANK1): c.- | 286 | ANK1 | [′CTGCGGGGCCTGTGACGTGCGGGCCRGGCC |
| | 108T > C | | | CCCGAGGGCCTTATCGGCCCC′] |
| 721 | NM_001145308.4(LRTOMT): c.313T > | 220074 | LRTOMT | [′TCACATCCTCACCACCCTGGACCACYGGAGC |
| | C (p.Trp105Arg) | | | AGCCGCTGCGAGTACTTGAG′] |
| 722 | NM_001012515.2(FECH): c.1268T > | 2235 | FECH | [′CCTGTCTGCAGGGAGACTAAATCCTYCTTCA |
| | C (p.Phe423Ser) | | | CCAGCCAGCAGCTGTGACCC′] |
| 723 | NM_000140.3(FECH): c.315- | 2235 | FECH | [′TATTGAGTAGAAAACATTTCTCAGGYTGCTA |
| | 48T > C | | | AGCTGGAATAAAATCCACTT′] |
| 724 | NM_024120.4(NDUFAF5): c.686T > | 79133 | NDUFAF5 | [′GCTGTCAATGACCTGGGACATCTGCYTGGG |
| | C (p.Leu229Pro) | | | AGAGCTGGCTTTAATACTCTG′] |
| 725 | NM_000277.1(PAH): c.932T > C | 5053 | PAH | [′TTACAGGAAATTGGCCTTGCCTCTCYGGGTG |
| | (p.Leu311Pro) | | | CACCTGATGAATACATTGAA′] |
| 726 | NM_000277.1(PAH): c.764T > C | 5053 | PAH | [′GGCCTGCTTTCCTCTCGGGATTTCTYGGGTG |
| | (p.Leu255Ser) | | | GCCTGGCCTTCCGAGTCTTC′] |
| 727 | NM_000277.1(PAH): c.143T > C | 5053 | PAH | [′TCACTCAAAGAAGAAGTTGGTGCATYGGCC |
| | (p.Leu48Ser) | | | AAAGTATTGCGCTTATTTGAG′] |
| 728 | NM_000277.1(PAH): c.1045T > C | 5053 | PAH | [′AAAGGCATATGGTGCTGGGCTCCTGBCATCC |
| | (p.Ser349Pro) | | | TTTGGTGAATTACAGGTATG′] |
| 729 | NM_000277.1(PAH): c.293T > C | 5053 | PAH | [GCTCTGACAAACATCATCAAGATCTYGAGG |
| | (p.Leu98Ser) | | | CATGACATTGGTGCCACTGTC′] |
| 730 | NM_000277.1(PAH): c.734T > C | 5053 | PAH | [′TGCACTGGTTTCCGCCTCCGACCTGHGGCTG |
| | (p.Val245Ala) | | | GCCTGCTTTCCTCTCGGGAT′] |
| 731 | NM_000277.1(PAH): c.194T > C | 5053 | PAH | [′GAGAATGATGTAAACCTGACCCACANTGAA |
| | (p.Ile65Thr) | | | TCTAGACCTTCTCGTTTAAAG′] |
| 732 | NM_000130.4(F5): c.1160T > C | 2153 | F5 | [′CATTTGGATAATTTCTCAAACCAAAYTGGAA |
| | (p.Ile387Thr) | | | AACATTATAAGAAAGTTATG′] |
| 733 | NM_000512.4(GALNS): c.413T > | 2588 | GALNS | [′AAGGCCGGCTACGTCAGCAAGATTGYCGGC |
| | C (p.Val138Ala) | | | AAGTGGTAAGTCTCCTGGCCA′] |
| 734 | NM_018077.2(RBM28): c.1052T > | 55131 | RBM28 | [′TCCTTTGACTCAGAAGAAGAAGAACYTGGG |
| | C (p.Leu351Pro) | | | GAGCTTCTCCAACAGTTTGGA′] |
| 735 | NM_203395.2(IYD): c.347T > C | 389434 | IYD | [′AATGAGCAAGTCCCAATGGAAGTCAYTGAT |
| | (p.Ile116Thr) | | | AATGTCATCAGAACGGCAGGT′] |
| 736 | NM_015702.2(MMADHC): c.776T > | 27249 | MMADHC | [′CATTTAGGATTCTCTGTTGATGACCYTGGAT |
| | C (p.Leu259Pro) | | | GCTGTAAAGTGATTCGTCAT′] |
| 737 | NM_014165.3(NDUFAF4): c.194T > | 29078 | NDUFAF4 | [′AAAGATGAAAAGCTGCTGTCGTTTCYAAAA |
| | C (p.Leu65Pro) | | | GATGTGTATGTTGATTCCAAA′] |
| 738 | NM_001136271.2(NKX2- | 137814 | NKX2-6 | [′GCAGGTGCTGGCCCTGGAGCGGCGCYTCAA |
| | 6): c.451T > C (p.Phe151Leu) | | | GCAGCAGCGGTACCTGTCAGC′] |
| 739 | NM_013319.2(UBIAD1): c.511T > | 29914 | UBIAD1 | [′TATCTACTTTGGAGGCCTGTCTGGCYCCTTT |
| | C (p.Ser171Pro) | | | CTCTACACAGGAGGTAAGAT′] |
| 740 | NM_001127628.1(FBP1): c.581T > | 2203 | FBP1 | [′TTGTCTAAAAAGGCCATCGGGGAGTYCATTT |
| | C (p.Phe194Ser) | | | TGGTGGACAAGGATGTGAAG′] |
| 741 | NM_000046.3(ARSB): c.349T > C | 411 | ARSB | [′TTTACAGCACCAAATAATCTGGCCCYGTCAG |
| | (p.Cys117Arg) | | | CCCAGCTGTGTTCCTCTGGA′] |
| 742 | NM_000046.3(ARSB): c.707T > C | 411 | ARSB | [′TCTTTCCAGCCTCTGTTTCTCTACCYTGCTCT |
| | (p.Leu236Pro) | | | CCAGTCTGTGCATGAGCCC′] |
| 743 | NM_000404.2(GLB1): c.152T > C | 2720 | GLB1 | [′AAGGATGGCCAGCCATTTCGCTACAYCTCA |
| | (p.Ile51Thr) | | | GGAAGCATTCACTACTCCCGT′] |
| 744 | NM_000404.2(GLB1): c.247T > C | 2720 | GLB1 | [′AAGGGGCTGTGTGTGTCTTGGCAGGBATGTG |
| | (p.Tyr83His) | | | CCCTGGAACTTTCATGAGCC′] |
| 745 | NM_024782.2(NHEJ1) : c.367T > | 79840 | NHEJ1 | [′CCTCCCCTTCTATTGGAATTTCCACYGCATG |
| | C (p.Cys123Arg) | | | CTAGCTAGTCCTTCCCTGGT′] |
| 746 | NM_139241.3(FGD4): c.893T > C | 121512 | FGD4 | [′CAGAAATTGGCACCATTCCTTAAGABGTATG |
| | (p.Met298Thr) | | | GAGAATATGTGAAAGGATTT′] |
| 747 | NM_020631.4(PLEKHG5): c.1940T > | 57449 | PLEKHG5 | [′TTGGGCCTTCCCTAACCAGGGTCCTYCCTCC |
| | C (p.Phe647Ser) | | | TTATCTACCTGAATGAGTTT′] |
| 748 | NM_015559.2(SETBP1): c.2612T > | 26040 | SETBP1 | [′GAGACGATCCCCAGCGACAGCGGCAYTGGG |
| | C (p.Ile871Thr) | | | ACAGACAACAACAGCACTTCT′] |
| 749 | NM_138387.3(G6PC3): c.554T > | 92579 | G6PC3 | [′CTCCTAGGCGCTGTCCTGGGCTGGCYGATGA |
| | C (p.Leu185Pro) | | | CTCCCCGAGTGCCTATGGAG′] |
| 750 | NM_022489.3(INF2): c.556T > C | 64423 | INF2 | [′CTTCAGCATTGTCATGAACGAGCTCYCCGGC |
| | (p.Ser186Pro) | | | AGCGACAACGTGCCCTACGT′] |
| 751 | NM_022489.3(INF2): c.125T > C | 64423 | INF2 | [′GACCCCGAGCTGTGCATCCGGCTGCYCCAG |
| | (p.Leu42Pro) | | | ATGCCCTCTGTGGTCAACTAC′] |
| 752 | NM_018122.4(DARS2): c.492 + 2T > | 55157 | DARS2 | [′TTTGAAATTAAGAACTTCGTGAAGGBACCA |
| | C | | | ACCTCTGTTATTAATAAAATA′] |
| 753 | NM_015272.3(RPGRIP1L): c.1975T > | 23322 | RPGR1P1L | [′CCTTCATCCCGAATATAACTTCACTYCTCAA |
| | C (p.Ser659Pro) | | | TATCTTGTTCATGTTAATGA′] |
| 754 | NM_001029871.3(RSP04): c.319T > | 343637 | RSPO4 | [′CTTCAGCCAGGACTTCTGCATCCGGYGCAAG |
| | C (p.Cys107Arg) | | | AGGCAGTTTTACTTGTACAA′] |
| 755 | NM_000429.2(MAT1A): c.914T > | 4143 | MAT1A | [′GCTGCCCGCTGGGTGGCCAAGTCTCYGGTG |
| | C (p.Leu305Pro) | | | AAAGCAGGGCTCTGCCGGAGA′] |
| 756 | NM_032581.3(FAM126A): c.158T > | 84668 | FAM126A | [′AACATTTTGTCTTTCTTCTAGTTGCBAGAAC |
| | C (p.Leu53Pro) | | | CTGTCTGTCACCAGCTCTTT′] |
| 757 | NM_006364.2(SEC23A): c.1144T > | 10484 | SEC23A | [′GGGTGATTCTTTCAATACTTCCTTAYTCAAA |
| | C (p.Phe382Leu) | | | CAAACTTTTCAAAGAGTCTT′] |
| 758 | NM_018006.4(TRMU): c.229T > | 55687 | TRMU | [′CCATCAAGTGTCCTACGTAAAGGAGYATTG |
| | C (p.Tyr77His) | | | GAATGATGTGTTCAGGTGAGT′] |
| 759 | NM_001174089.1(SLC4A11): | 83959 | SLC4A11 | [′CTGCAGGTGCTTCAGCTGCTGCTGCYGTGTG |
| | c.2480T > C (p.Leu827Pro) | | | CCTTCGGCATGAGCTCCCTG′] |
| 760 | NM_001174089.1(SLC4A11): c.589T > | 83959 | SLC4A11 | [′AGTGACAGGGGTGCGGTACCAGCAGYCGTG |
| | C (p.Ser197Pro) | | | GCTCTGCATCATGTGAGTTGC′] |
| 761 | NM_148960.2(CLDN19): c.269T > | 149461 | CLDN19 | [′GCCCTGATGGTGGTGGCCGTGCTCCYGGGCT |
| | C (p.Leu90Pro) | | | TCGTGGCCATGGTCCTCAGC′] |
| 762 | NM_153704.5(TMEM67): c.2498T > | 91147 | TMEM67 | [′AACACAGATGGTCAGACTTTTGAGAYTGCA |
| | C (p.Ile833Thr) | | | ATTTCTAACCAGATGAGACAA′] |
| 763 | NM_153704.5(TMEM67): c.1769T > | 91147 | TMEM67 | [′ACAGGTCTTTACTGGCTTATTTTCTYCAAAG |
| | C (p.Phe590Ser) | | | TGAGTGAGTTTCTGAATTTT′] |
| 764 | NM_153704.5(TMEM67): c.1843T > | 91147 | TMEM67 | [′AGAACGTTTTGTCACTTATGTTGGAHGTGCC |
| | C (p.Cys615Arg) | | | TTTGCTCTGAAGGTAAGTTT′] |
| 765 | NM_153704.5(TMEM67): c.755T > | 91147 | TMEM67 | [′ACATCTTGTCAAGCTCTTGGAAATAYGTGTG |
| | C (p.Met252Thr) | | | TGATGAACATGAATTCTTAC′] |
| 766 | NM_017777.3(MKS1): c.80 + 2T > | 54903 | MKS1 | [′CCCCGTGCGCAACTTGCGCCTCCGGYAGTCG |
| | C | | | CACCGCCCCAGCCCCGAGGC′] |
| 767 | NM_001041.3(SI): c.1022T > C | 6476 | SI | [′AATTACATGCTCATTTACTTTAAGCYTGTTG |
| | (p.Leu341Pro) | | | GACTACCAGCAATGCCAGCA′] |
| 768 | NM_001041.3(SI): c.1859T > C | 6476 | SI | [′ATGGAATGGTCTATAACTGGAATGCYGGAG |
| | (p.Leu620Pro) | | | TTCAGTTTGTTTGGAATACCT′] |
| 769 | NM_015506.2(MMACHC): c.347T > | 25974 | MMACHC | [′CACCCCAACCGACGCCCCAAGATCCYGGCC |
| | C (p.Leu116Pro) | | | CAGACAGCAGCCCATGTAGCT′] |
| 770 | NM_000190.3(HMBS): c.739T > | 3145 | HMBS | [′GCACGATCCCGAGACTCTGCTTCGCYGCATC |
| | C (p.Cys247Arg) | | | GCTGAAAGGGCCTTCCTGAG′] |
| 771 | NM_000190.3(HMBS): c.242T > | 3145 | HMBS | [′GAGAAAAGCCTGTTTACCAAGGAGCYTGAA |
| | C (p.Leu81Pro) | | | CATGCCCTGGAGAAGAATGAG′] |
| 772 | NM_000237.2(LPL): c.662T > C | 4023 | LPL | [′ACCAGAGGGTCCCCTGGTCGAAGCAYTGGA |
| | (p.Ile221Thr) | | | ATCCAGAAACCAGTTGGGCAT′] |
| 773 | NM_000237.2(LPL): c.337T > C | 4023 | LPL | [′AGACTCCAATGTCATTGTGGTGGACYGGCTG |
| | (p.Trp113Arg) | | | TCACGGGCTCAGGAGCATTA′] |
| 774 | NM_000237.2(LPL): c.755T > C | 4023 | LPL | [′AACATTGGAGAAGCTATCCGCGTGAYTGCA |
| | (p.Ile252Thr) | | | GAGAGAGGACTTGGAGGTAAA′] |
| 775 | NM_000263.3(NAGLU): c.142T > | 4669 | NAGLU | [′GCTGGGGCCAGGCCCCGCGGCCGACYTCTC |
| | C (p.Phe48Leu) | | | CGTGTCGGTGGAGCGCGCTCT′] |
| 776 | NM_000018.3(ACADVL): c.1372T > | 37 | ACADVL | [′GCGTGTGCTCCGAGATCTTCGCATCYTCCGG |
| | C (p.Phe458Leu) | | | ATCTTTGAGGGGACAAATGA′] |
| 777 | NM__018105.2(THAP 1): c.241T > | 55145 | THAP1 | [′GAAAGAGAATGCTGTGCCCACAATAYTTCTT |
| | C (p.Phe81Leu) | | | TGTACTGAGCCACATGACAA′] |
| 778 | NM_005908.3(MANBA): c.1513T > | 4126 | MANBA | [′AGACAAGAGTCGTCCTTTTATTACGYCCAGT |
| | C (p.Ser505Pro) | | | CCTACAAATGGGGCTGAAAC′] |
| 779 | NM_000124.3(ERCC6): c.2960T > | 2074 | ERCC6 | [′AAGCAGTTTTTGACAAATAGAGTGCYAAAA |
| | C (p.Leu987Pro) | | | GACCCAAAACAAAGGCGGTTT′] |
| 780 | NM_014845.5(FIG4): c.122T > C | 9896 | FIG4 | [′GAAACGAAATATCGTGTCTTGAAGAYTGAT |
| | (p.Ile41Thr) | | | AGAACAGAACCAAAAGATTTG′] |
| 781 | NM_000787.3(DBH): c.339+2T > | 1621 | DBH | [′GATGGGGACACTGCCTATTTTGCGGYGAGTC |
| | C | | | TCTCCTCCCTGCCAGCTCTC′] |
| 782 | NM_000102.3(CYP17A1): c.316T > | 1586 | CYP17A1 | [′TCTAAAGGCAACTCTAGACATCGCGYCCAA |
| | C (p.Ser106Pro) | | | CAACCGTAAGGGTATCGCCTT′] |
| 783 | NM_000102.3(CYP17A1): c.1216T > | 1586 | CYP17A1 | [′GGCGCTGCATCACAATGAGAAGGAGYGGCA |
| | C (p.Trp406Arg) | | | CCAGCCGGATCAGTTCATGCC′] |
| 784 | NM_000102.3(CYP17A1): c.1358T > | 1586 | CYP17A1 | [′GAGATCCTGGCCCGCCAGGAGCTCTYCCTCA |
| | C (p.Phe453Ser) | | | TCATGGCCTGGCTGCTGCAG′] |
| 785 | NM_152783.4(D2HGDH): c.1331T > | 728294 | D2HGDH | [′GGAGATGGTAACCTGCACCTCAATGYGACG |
| | C (p.Val444Ala) | | | GCGGAGGCCTTCAGCCCCTCG′] |
| 786 | NM_000255.3(MUT): c.313T > C | 4594 | MUT | [′TCCTACCATGTATACCTTTAGGCCCYGGACC |
| | (p.Trp105Arg) | | | ATCCGCCAGTATGCTGGTTT′] |
| 787 | NM_000411.6(HLCS): c.710T > C | 3141 | HLCS | [′CTGTACCAGAAGTTCATGGCCTATCYTTCTC |
| | (p.Leu237Pro) | | | AGGGAGGGAAGGTGTTGGGC′] |
| 788 | NM_022132.4(MCCC2): c.499T > | 64087 | MCCC2 | [′AATTGCCATGCAAAACAGGCTCCCCYGCAT |
| | C (p.Cys167Arg) | | | CTACTTAGGCAAGTCACCAGA′] |
| 789 | NM_020166.4(MCCC1): c.1310T > | 56922 | MCCC1 | [′CATTATGACCCCATGATTGCGAAGCYGGTCG |
| | C (p.Leu437Pro) | | | TGTGGGCAGCAGATCGCCAG′] |
| 790 | NM_198578.3(LRRK2): c.6059T > | 120892 | LR12K2 | [′ATTGCAAAGATTGCTGACTACGGCAYTGCTC |
| | C (p.Ile2020Thr) | | | AGTACTGCTGTAGAATGGGG′] |
| 791 | NM_000022.2(ADA): c.320T > C | 100 | ADA | [′GAGGTGCGGTACAGTCCGCACCTGCYGGCC |
| | (p.Leu107Pro) | | | AACTCCAAAGTGGAGCCAATC′] |
| 792 | NM_199242.2(UNC13D): c.1208T > | 201294 | UNC13D | [′CTGGCCGCCTCATTCAGCTCCCTGCYGACCT |
| | C (p.Leu403Pro) | | | ACGGCCTCTCCCTCATCCGG′] |
| 793 | NM_152443.2(RDH12): c.523T > | 145226 | RDH12 | [′CCCTGCACGGGTGGTTAATGTGTCCYCGGTG |
| | C (p.Ser175Pro) | | | GCTCACCACATTGGCAAGAT′] |
| 794 | NM_020435.3(GJC2): c.857T > C | 57165 | GJC2 | [′TGCCTGCTGCTCAACCTCTGTGAGAYGGCCC |
| | (p.Met286Thr) | | | ACCTGGGCTTGGGCAGCGCG′] |
| 795 | NM_000159.3(GCDH): c.883T > | 2639 | GCDH | [′CTTCGGCTGCCTGAACAACGCCCGGYACGG |
| | C (p.Tyr295His) | | | CATCGCGTGGGGCGTGCTTGG′] |
| 796 | NM_000920.3(PC): c.434T > C | 5091 | PC | [′CGGTTTATTGGGCCAAGCCCAGAAGBGGTC |
| | (p.Val145Ala) | | | CGCAAGATGGGAGACAAGGTG′] |
| 797 | NM_207118.2(GTF2H5): c.62T > | 404672 | GTF2H5 | [′GATCCTGCCATGAAGCAGTTTCTGCYGTACT |
| | C (p.Leu21Pro) | | | TGGATGAGTCCAATGCCCTG′] |
| 798 | NM_005787.5(ALG3): c.211T > C | 10195 | ALG3 | [′TCTTCTTCCAGACACAGAGATTGACYGGAA |
| | (p.Trp7lArg) | | | GGCCTACATGGCCGAGGTAGA′] |
| 799 | NM_024514.4(CYP2R1): c.296T > | 120227 | CYP2R1 | [′GGCTATGATGTAGTAAAGGAATGCCYTGTTC |
| | C (p.Leu99Pro) | | | ATCAAAGCGAAATTTTTGCA′] |
| 800 | NM_017929.5(PEX26): c.2T > C | 55670 | PEX26 | [′CTGGGCCTTGGACCCGGACTCGTTAYGAAG |
| | (p.Met1Thr) | | | AGCGATTCTTCGACCTCTGCA′] |
| 801 | NM_017929.5(PEX26): c.134T > | 55670 | PEX26 | [′CTTCTGGAGGAGGCGGCCGACCTCCYGGTG |
| | C (p.Leu45Pro) | | | GTGCACCTGGACTTCCGGGCG′] |
| 802 | NM_213599.2(AN05): c.1066T > | 203859 | ANO5 | [′TGGTCAGATGATCATGTGCCCACTCBGTGAT |
| | C (p.Cys356Arg) | | | CAAGTGTGTGATTATTGGAG′] |
| 803 | NM_022370.3(ROBO3): c.2113T > | 64221 | ROBO3 | [′CCAGCTGGTGCAAGGTTTCCGGGTGHCTTGG |
| | C (p.Ser705Pro) | | | AGGGTAGCAGGCCCTGAGGG′] |
| 804 | NM_022370.3(ROBO3): c.14T > C | 64221 | ROBO3 | [′CTGGGTCGAGCCATGCTGCGCTACCYGCTGA |
| | (p.Leu5Pro) | | | AAACGCTGCTGCAGATGAAC′] |
| 805 | NM_207352.3(CYP4V2): c.332T > | 285440 | CYP4V2 | [′GTATGTTTTTCTCTTCCTAAGGTAABTTTAAC |
| | C (p.Ile111Thr) | | | TAGTTCAAAGCAAATTGAC′] |
| 806 | NM_178857.5(RP1L1): c.2878T > | 94137 | RP1L1 | [′GTCTCCAGAGGCTGTGGTCCGCGAAYGGCT |
| | C (p.Trp960Arg) | | | GGACAACATTCCAGAAGAGCC′] |
| 807 | NM_018668.4(VPS33B): c.89T > | 26276 | VPS33B | [′GCTCGAGACCAGCTCATCTATCTGCYGGAGC |
| | C (p.Leu30Pro) | | | AGGTCAGTGCTTGCCTGACG′] |
| 808 | NM_024006.5(VKORC1): c.134T > | 79001 | VKORC1 | [′CGGGATTACCGCGCGCTCTGCGACGYGGGC |
| | C (p.Val45Ala) | | | ACCGCCATCAGCTGTTCGCGC′] |
| 809 | NM_000551.3(VHL): c.334T > C | 7428 | VHL | [′TGGCACGGGCCGCCGCATCCACAGCHACCG |
| | (p.Tyr112His) | | | AGGTACGGGCCCGGCGCTTAG′] |
| 810 | NM_000551.3(VHL): c.292T > C | 7428 | VHL | [′CAACTTCGACGGCGAGCCGCAGCCCYACCC |
| | (p.Tyr98His) | | | AACGCTGCCGCCTGGCACGGG′] |
| 811 | NM_000551.3(VHL): c.188T > C | 7428 | VHL | [′GAGGCCGGGCGGCCGCGGCCCGTGCYGCGC |
| | (p.Leu63Pro) | | | TCGGTGAACTCGCGCGAGCCC′] |
| 812 | NM_000551.3(VHL): c.488T > C | 7428 | VHL | [′GTGTATACTCTGAAAGAGCGATGCCYCCAG |
| | (p.Leu163Pro) | | | GTTGTCCGGAGCCTAGTCAAG′] |
| 813 | NM_014874.3(MFN2): c.227T > C | 9927 | MFN2 | [′CCCGTTACCACAGAAGAACAGGTTCBGGAC |
| | (p.Leu76Pro) | | | GTCAAAGGTTACCTATCCAAA′] |
| 814 | NM_015046.5(SETX): c.1166T > | 23064 | SETX | MACATGTATGAAGAAATGGAAACATYAGCC |
| | C (p.Leu389Ser) | | | AGTGTACTTCAGTCAGATATT′] |
| 815 | NM_005609.2(PYGM): c.1187T > | 5837 | PYGM | [′TGGCCGGTGCACCTCTTGGAGACGCYGCTGC |
| | C (p.Leu396Pro) | | | CGCGGCACCTCCAGATCATC′] |
| 816 | NM_005609.2(PYGM): c.2392T > | 5837 | PYGM | [′CTTTGACCTGCAGAACCCAAGAGAGHGGAC |
| | C (p.Trp798Arg) | | | GCGGATGGTGATCCGGAACAT′] |
| 817 | NM_213653.3(HFE2): c.842T > C | 148738 | HFE2 | [′CATGTGGAGATCCAAGCTGCCTACAYTGGC |
| | (p.Ile281Thr) | | | ACAACTATAATCATTCGGCAG′] |
| 818 | NM_213653.3(HFE2): c.238T > C | 148738 | HFE2 | [′TGGAGGGGTGGGCTCTGGCGGCCTCBGTCG |
| | (p.Cys80Arg) | | | AGCCCTCCGCTCCTATGCGCT′] |
| 819 | NM_213653.3(HFE2): c.302T > C | 148738 | HFE2 | [′ACCGCCCGCACCTGCCGCGGGGACCYCGCC |
| | (p.Leu101Pro) | | | TTCCATTCGGCGGTACATGGC′] |
| 820 | NM_000045.3(ARG1): c.32T > C | 383 | ARG1 | [′GCCAAGTCCAGAACCATAGGGATTAYTGGA |
| | (p.Ile11Thr) | | | GCTCCTTTCTCAAAGGGACAG′] |
| 821 | NM_032409.2(PINK1): c.1040T > | −1 | — | [′GCCGCCATGATGCTGCTGCAGCTGCYGGAA |
| | C (p.Leu347Pro) | | | GGCGTGGACCATCTGGTTCAA′] |
| 822 | NM_153006.2(NAGS): c.1289T > | −1 | — | [′GCCAGGTACAACGCCGCCGCCATTCYGACC |
| | C (p.Leu430Pro) | | | ATGGAGCCCGTCCTGGGGGGC′] |
| 823 | NM_153006.2(NAGS): c.1450T > | −1 | — | [′CCGGGTCACCAACCCCATCAATCCCBGGTAG |
| | C (p.Trp484Arg) | | | GTCCTGCCACTCCCAGCTCT′] |
| 824 | NM_001173464.1(KIF21A): c.3029T > | 55605 | KIF21A | [′AGTATTTCTGATTGTCAGGCCAACAYAATGC |
| | C (p.Ile1010Thr) | | | AGATGGAAGAAGCAAAGGTT′] |
| 825 | NM_001173464.1(KIF21A): c.1067T > | 55605 | KIF21A | [′GTCAGCCCTTCAGACAGAGACTTTAYGGAA |
| | C (p.Met356Thr) | | | ACGTTAAACACCCTGAAATAC′] |
| 826 | NM_000434.3(NEU1): c.1088T > | 4758 | NEU1 | [′TCATGGCGGAAAGAGACAGTCCAGCYATGG |
| | C (p.Leu363Pro) | | | CCAGGCCCCAGTGGCTATTCA′] |
| 827 | NM_000434.3(NEU1): c.718T > C | 4758 | NEU1 | [′CCTCAGCGATGATCATGGTGCCTCCYGGCGC |
| | (p.Trp240Arg) | | | TACGGAAGTGGGGTCAGCGG′] |
| 828 | NM_000026.2(ADSL): c.1312T > | 158 | ADSL | [′TGATGCCTACTTCAGTCCCATTCACYCCCAG |
| | C (p.Ser438Pro) | | | TTGGATCATTTACTGGATCC′] |
| 829 | NM_000026.2(ADSL): c.674T > C | 158 | ADSL | [′TCCAAGGTAGAGCAGCTTGACAAGAYGGTG |
| | (p.Met225Thr) | | | ACAGAAAAGGCAGGATTTAAG′] |
| 830 | NM_018400.3(SCN3B): c.29T > C | 55800 | SCN3B | [′CCTGCCTTCAATAGATTGTTTCCCCYGGCTT |
| | (p.Leu10Pro) | | | CTCTCGTGCTTATCTACTGG′] |
| 831 | NM_024577.3(SH3TC2): c.505T > | 79628 | SH3TC2 | [′CCTTCCTGTATCAGGAGTCCCAGGTRTATTG |
| | C (p.Tyr169His) | | | TTTCCAGGTGTTTATCATCT′] |
| 832 | NM_000243.2(MEFV): c.2177T > | 4210 | MEFV | [′GTGGGCATCTTCGTGGACTACAGAGHTGGA |
| | C (p.Val726Ala) | | | AGCATCTCCTTTTACAATGTG′] |
| 833 | NM_000483.4(APOC2): c.142T > | −1 | — | [′GGTGAAGGAATCTCTCTCCAGTTACYGGGA |
| | C (p.Trp48Arg) | | | GTCAGCAAAGACAGCCGCCCA′] |
| 834 | NM_058172.5(ANTXR2): c.566T > | 118429 | ANTXR2 | [′CTCTTCTTTCTAAAGCTTGAAAGAAYTGCTG |
| | C (p.Ile189Thr) | | | ATTCCAAGGAGCAAGTTTTC′] |
| 835 | M_001128085.1(ASPA): c.454T > | −1 | — | [′TCAGACTTCTCTGGCTCCACTACCCYGCTAC |
| | C (p.Cys152Arg) | | | GTTTATCTGATTGAGCATCC′] |
| 836 | NM_022464.4(SIL1): c.645 + 2T > | 64374 | SIL1 | [′TGACTTATGGACGAAGAAATACAGTRCCTG |
| | C | | | ATGGACATAATATTCAAGATC′] |
| 837 | NM_001037633.1(SIL1): c.1370T > | 64374 | SIL1 | [′CTGCTGGGCTCTGTCAACAGCTTGCYGAAGG |
| | C (p.Leu457Pro) | | | AGCTGAGATGAGGCCCCACA′] |
| 838 | NM_000391.3(TPP1): c.1093T > C | 1200 | TPP1 | [′TCTCTCAGGTGACAGTGGGGCCGGGYGTTG |
| | (p.Cys365Arg) | | | GTCTGTCTCTGGAAGACACCA′] |
| 839 | NM_182760.3(SUMF1): c.1006T > | 285362 | SUMF1 | [′AGTGAAGAAAGGTGGATCCTACATGYGCCA |
| | C (p.Cys336Arg) | | | TAGGGTAAGTCATGTCACTAA′] |
| 840 | NM_182760.3(SUMF1): c.463T > | 285362 | SUMF1 | [′CTTATAGGCTGAGAAGTTTGGCGACYCCTTT |
| | C (p.Ser155Pro) | | | GTCTTTGAAGGCATGTTGAG′] |
| 841 | NM_177986.3(DSG4): c.574T > C | −1 | — | [′TGCAGATGAAGAAAATCATCTGAATHCTAA |
| | (p.Ser192Pro) | | | AATTGCCTACAAGATCGTCTC] |
| 842 | NM_004183.3(BEST1): c.253T > | 7439 | BEST1 | [′CCCCCGCCCCTCCTGCCCAGGCTTCYACGTG |
| | C (p.Tyr85His) | | | ACGCTGGTCGTGACCCGCTG′] |
| 843 | NM_004183.3(BEST1): c.122T > | 7439 | BEST1 | [′TATGGCGAGTTCTTAATCTTCCTGCYCTGCT |
| | C (p.Leu41Pro) | | | ACTACATCATCCGCTTTATT′] |
| 844 | NM_004183.3(BEST1): c.614T > | 7439 | BEST1 | [′CTTGGAGGTCGAATCCGGGACCCTAYCCTGC |
| | C (p.Ile205Thr) | | | TCCAGAGCCTGCTGAACGTG′] |
| 845 | NM_004183.3(BEST1): c.704T > | 7439 | BEST1 | [′TACGACTGGATTAGTATCCCACTGGYGTATA |
| | C (p.Val235Ala) | | | CACAGGTGAGGACTAGGCTG′] |
| 846 | NM_024312.4(GNPTAB): c.1120T > | 79158 | GNPTAB | [′TGTTTGTTGTTGTTAAAAGGATGTTYTTCGA |
| | C (p.Phe374Leu) | | | AATTTGAGCCACTTGCCTAC′] |
| 847 | NM_000158.3(GBE1): c.671T > C | 2632 | GBE1 | [′TATAAACATTTTACATGCAATGTACYACCAA |
| | (p.Leu224Pro) | | | GAATCAAAGGCCTTGGTAAG′] |
| 848 | NM_017890.4(VPS13B): c.8459T > | 157680 | VPS13B | [′CAGGTGCCATCTTCAAACAGTTCCAYTATTT |
| | C (p.Ile2820Thr) | | | ATGTCTGGTGCACAGTTTTG′] |
| 849 | NM_000019.3(ACAT1): c.935T > | 38 | ACAT1 | [′CTCAATGTTACACCACTGGCAAGAAYAGTA |
| | C (p.Ile312Thr) | | | GGTAAGGCCAGGCGAGGTGGC′] |
| 850 | NM_020184.3(CNNM4): c.971T > | 26504 | CNNM4 | [′CTCAGTTTTCCCATTAGCAAGCTCCYGGACT |
| | C (p.Leu324Pro) | | | TTTTTCTGGGCCAGGAGATT′] |
| 851 | NM_001171507.2(MCFD2): c.407T > | 90411 | MCFD2 | [′GATGACAAGAACAATGATGGATACAYTGAC |
| | C (p.Ile136Thr) | | | TATGCTGAATTTGCAAAATCA′] |
| 852 | NM_174936.3(PCSK9): c.646T > | 255738 | PCSK9 | [′TGTGCCCGAGGAGGACGGGACCCGCYTCCA |
| | C (p.Phe216Leu) | | | CAGACAGGTAAGCACGGCCGT′] |
| 853 | NM_000419.3(ITGA2B): c.1787T > | 3674 | ITGA2B | [′GACTTCCGGGACAAGCTGAGCCCCAYTGTG |
| | C (p.Ile596Thr) | | | CTCAGCCTCAATGTGTCCCTA′] |
| 854 | NM_000419.3(ITGA2B): c.641T > | 3674 | ITGA2B | [′CCCTTCCAGGCCGGAGAGCTGGTGCYTGGG |
| | C (p.Leu214Pro) | | | GCTCCTGGCGGCTATTATTTC′] |
| 855 | NM_004817.3(TJP2): c.143T > C | 9414 | TJP2 | [′TCCAAAAGAGGATTTGGAATTGCAGYGTCC |
| | (p.Val48Ala) | | | GGAGGCAGAGACAACCCCCAC′] |
| 856 | NM_173477.4(1JSH1G): c.143T > | 124590 | USH1G | [′GCCTACCATGGCAACCTCGAGTCGCYGCGTC |
| | C (p.Leu48Pro) | | | TCATTGTGAGCCGCGGGTGA′] |
| 857 | NM_000271.4(NPC1): c.3182T > | 4864 | NPC1 | [′GACGCTCTGAAGAAAGCCCGACTTAYAGCC |
| | C (p.Ile1061Thr) | | | AGTAATGTCACCGAAACCATG′] |
| 858 | NM_000271.4(NPC1): c.1133T > | 4864 | NPC1 | [′TTTGTCCGGGTCACAACCAATCCAGYTGACC |
| | C (p.Val378Ala) | | | TCTGGTCAGCCCCCAGCAGC′] |
| 859 | NM_000271.4(NPC1): c.337T > C | 4864 | NPC1 | [′ACTGAACCTGTTTTGTGAGCTGACAYGTAGC |
| | (p.Cys113Arg) | | | CCTCGACAGAGTCAGTTTTT′] |
| 860 | NM_000543.4(SMPD1): c.911T > | 6609 | SMPD1 | [′CGGGCCCTGACCACCGTCACAGCACYTGTG |
| | C (p.Leu304Pro) | | | AGGAAGTTCCTGGGGCCAGTG′] |
| 861 | NM_000226.3(KRT9): c.503T > C | 3857 | KRT9 | [CTCAATTCTCGGCTGGCCTCTTACTYGGATA |
| | (p.Leu168Ser) | | | AGGTGCAGGCTCTAGAGGAG′] |
| 862 | NM_000226.3(KRT9): c.470T > C | 3857 | KRT9 | [′CTGACTGCTAATGAGAAGAGCACCANGCAG |
| | (p.Met157Thr) | | | GAACTCAATTCTCGGCTGGCC′] |
| 863 | NM_000051.3(ATM): c.7967T > C | −1 | — | [′CCAGCAGACCAGCCAATTACTAAACYTAAG |
| | (p.Leu2656Pro) | | | AATTTAGAAGATGTTGTTGTC′] |
| 864 | NM_000487.5(ARSA): c.410T > C | 410 | ARSA | [′GGGGTGGGGCCTGAGGGGGCCTTCCYGCCC |
| | (p.Leu137Pro) | | | CCCCATCAGGGCTTCCATCGA′] |
| 865 | NM_017653.3(DYM): c.1624T > | 54808 | DYM | [′AATGATGTTAGAGATCATCAACTCCYGCCTG |
| | C (p.Cys542Arg) | | | ACAAATTCCCTTCACCACAA′] |
| 866 | NM_016038.2(SBDS): c.258 + 2T > | 51119 | SBDS | [′GACCAAACTGAAATCTGTAAGCAGGYGGGT |
| | C | | | AACAGCTGCAGCATAGCTAAC′] |
| 867 | NM_001079802.1(FKTN): c.527T > | 2218 | FKTN | [′ACTCATGCGATCCACTTGGTAGTCTYTCATG |
| | C (p.Phe176Ser) | | | AGAGGAGTGGCAACTACCTC′] |
| 868 | NM_013382.5(POMT2): c.2242T > | 29954 | POMT2 | [′GGCAGGACTAAGGTGGCTGGACTCAYGGGA |
| | C (p.Trp748Arg) | | | CTTTTGAGGCCACTGCAAAGA′] |
| 869 | NM_024529.4(CDC73): c.191T > | 79577 | CDC73 | [′ACATTGGATTCCATTTTATTTCTACYTAATA |
| | C (p.Leu64Pro) | | | ACGTGCACCTTTCTCATCCT′] |
| 870 | NM_000268.3(NF2): c.1079T > C | 4771 | NF2 | [′ACGAGGGATGAGTTGGAGAGGAGGCYGCTG |
| | (p.Leu360Pro) | | | CAGATGAAAGAAGAAGCAACA′] |
| 871 | NM_000268.3(NF2): c.1604T > C | 4771 | NF2 | [′GAATACATGGAAAAGAGCAAGCATCYGCAG |
| | (p.Leu535Pro) | | | GAGCAGCTCAATGAACTCAAG′] |
| 872 | NM_000268.3(NF2): c.185T > C | 4771 | NF2 | [′CTGGGGCTCCGAGAAACCTGGTTCTYTGGAC |
| | (p.Phe62Ser) | | | TGCAGTACACAATCAAGGAC′] |
| 873 | NM_139248.2(LIPH): c.322T > C | 200879 | LIPH | [′AGACATGAACGTAGTTGTTGTTGATYGGAAT |
| | (p.Trp108Arg) | | | CGAGGAGCTACAACTTTAAT′] |
| 874 | NM_015102.4(NPHP4): c.2972T > | 261734 | NPHP4 | [′GCCACGCTGGGGGTCGCCGAGTTCTYTGAGT |
| | C (p.Phe991Ser) | | | TTGTGCTTAAGAACCCCCAC′] |
| 875 | NM_024105.3(ALG12): c.473T > | 79087 | ALG12 | [′ACCCTCCCGCACTGTCTTGCAGTCCYGCTGG |
| | C (p.Leu158Pro) | | | CCCTCGCGGCCTGGCTGCGG′] |
| 876 | NM_000280.4(PAX6): c.773T > C | 5080 | PAX6 | [′GTCCCACCTGATTTCCAGGTATGGTYTTCTA |
| | (p.Phe258Ser) | | | ATCGAAGGGCCAAATGGAGA′] |
| 877 | NM_024426.4(WT1): c.1351T > C | 7490 | WT1 | [′CTCTGTCCATTTAGGTGTGAAACCAYTCCAG |
| | (p.Phe451Leu) | | | TGTAAAACTTGTCAGCGAAA′] |
| 878 | NM_024426.4(WT1): c.1378T > C | 7490 | WT1 | [′CCAGTGTAAAACTTGTCAGCGAAAGYTCTCC |
| | (p.Phe460Leu) | | | CGGTCCGACCACCTGAAGAC′] |
| 879 | NM_005957.4(MTHFR): c.968T > | 4524 | MTHFR | [′GTGCCAGGCCTCCACTTCTACACCCYCAACC |
| | C (p.Leu323Pro) | | | GCGAGATGGCTACCACAGAG′] |
| 880 | NM_016247.3(IMPG2): c.370T > | 50939 | IMPG2 | [′TCACGCCCAGGAAGTCGATCCCAAARAGTC |
| | C (p.Phe124Leu) | | | CTGAAGGCTTCCCAGACAGCT′] |
| 881 | NM_002225.3(IVD): c.134T > C | 3712 | IVD | [′CCCGTGGACGATGCAATCAATGGGCYAAGC |
| | (p.Leu45Pro) | | | GAGGAGCAGAGGCAGGTGAGG′] |
| 882 | NM_001127328.2(ACADM): c. | 34 | ACADM | [′CAGTTAGCTACTGATGCTGTGCAGAYACTTG |
| | 1136T > C (p.Ile379Thr) | | | GAGGCAATGGATTTAATACA′] |
| 883 | NM_001127328.2(ACADM): c. | 34 | ACADM | [′TTAGGAATTAAACATGGGCCAGCGAYGTTC |
| | 742T > C (p.Cys248Arg) | | | AGATACTAGAGGAATTGTCTT′] |
| 884 | NM_000016.5(ACADM): c.199T> | 34 | ACADM | [′GGAAATCATCCCAGTGGCTGCAGAAYATGA |
| | C (p.Tyr67His) | | | TAAAACTGGTGAAGTAGGTAT′] |
| 885 | NM_000155.3(GALT): c.221T > C | 2592 | GALT | [′CCCCGCCATGACCCTCTCAACCCTCBGTGTC |
| | (p.Leu74Pro) | | | CTGGGGCCATCCGAGCCAAC′] |
| 886 | NM_000155.3(GALT): c.512T > C | 2592 | GALT | [′CTCCGTATCCCTATCTGATAGATCTYTGAAA |
| | (p.Phe171Ser) | | | ACAAAGGTGCCATGATGGGC′] |
| 887 | NM_000155.3(GALT): c.580T > C | 2592 | GALT | [′CCCTTGACAGGTATGGGCCAGCAGTYTCCTG |
| | (p.Phe194Leu) | | | CCAGATATTGCCCAGCGTGA′] |
| 888 | NM_000250.1(MPO): c.752T > C | 4353 | MPO | [′ACTCCGGACCAGGAGCGCTCACTCAYGTTC |
| | (p.Met251Thr) | | | ATGCAATGGGGCCAGCTGTTG′] |
| 889 | NM_020247.4(ADCK3): c.1398 + | 56997 | ADCK3 | [′CTCAGCCAGGAGATTCGGAACGAGGYTTGT |
| | 2T > C | | | CTGTGCCAGCAGACAGGTGGG′] |
| 890 | NM_000229.1(LCAT): c.508T > C | 3931 | LCAT | [′GACTGTGCGCGCCGCCCCCTATGACYGGCG |
| | (p.Trp170Arg) | | | GCTGGAGCCCGGTGAGTGTCT′] |
| 891 | NM_000229.1(LCAT): c.698T > C | 3931 | LCAT | [′CGCTTTATTGATGGCTTCATCTCTCYTGGGG |
| | (p.Leu233Pro) | | | CTCCCTGGGGTGGCTCCATC′] |
| 892 | NM_000229.1(LCAT): c.524- | 3931 | LCAT | [′CAGGTGCCCCAGACCCCAGCTGCCCYGACC |
| | 22T > C | | | CCTTCCACCCGCTGCAGGCCA′] |
| 893 | NM_000403.3(GALE): c.548T > C | 2582 | GALE | [′CCACAGACTTGGAACGCAGTGCTGCYGCGC |
| | (p.Leu183Pro) | | | TATTTCAACCCCACAGGTGCC′] |
| 894 | NM_000527.4(LDLR): c.694 + 2T > | 3949 | LDLR | [′ACAAATCTGACGAGGAAAACTGCGGYATGG |
| | C | | | GCGGGGCCAGGGTGGGGGCGG′] |
| 895 | NM_000375.2(UROS): c.217T > C | 7390 | UROS | [′CAGAGCAGTGGAAGCAGCAGAGTTAYGTTT |
| | (p.Cys73Arg) | | | GGAGCAAAACAATAAAACTGA] |
| 896 | NM_000375.2(UROS): c.-26 − | 7390 | UROS | [′GCTAACATGCTCTTTCTTGGCCTTAYCAGTG |
| | 177T > C | | | ACAGGGGTCTTCAGAAAGAA′] |
| 897 | NM_000372.4(TYR): c.265T > C | 7299 | TYR | [′GCCTTCCGTCTTTTATAATAGGACCYGCCAG |
| | (p.Cys89Arg) | | | TGCTCTGGCAACTTCATGGG′] |
| 898 | NM_000017.3(ACADS): c.529T > | 35 | ACADS | [′CACCGCCCGGGCCGAGGGCGACTCABGGGT |
| | C (p.Trp177Arg) | | | TCTGAATGGAACCAAAGCCTG′] |
| 899 | NM_000053.3(ATP7B): c.3443T > | 540 | ATP7B | [′GCGCCTCAGCCACTCACGGTTTCCARTCAGC |
| | C (p.Ile1148Thr) | | | ACAGAGAAGGTCTGGGGGAC′] |
| 900 | NM_000053.3(ATP7B): c.2123T > | 540 | ATP7B | [′GCCTTCACTGTCCTTGTCTTTCAGCYCCTCG |
| | C (pLeu708Pro) | | | GTGGGTGGTACTTCTACGTT′] |
| 901 | NM_000520.4(HEXA): c.1453T > | 3073 | HEXA | [′AGCAGGGGCTGTTGCCGAAAGGCTGYGGAG |
| | C (p.Trp485Arg) | | | CAACAAGTTGACATCTGACCT′] |
| 902 | NM_000520.4(HEXA): c.632T > C | 3073 | HEXA | [′TGGCATCTGGTAGATGATCCTTCCTYCCCAT |
| | (p.Phe211Ser) | | | ATGAGAGCTTCACTTTTCCA′] |
| 903 | NM_000520.4(HEXA): c.538T > C | 3073 | HEXA | [′CTTGCTGTTGGATACATCTCGCCATYACCTG |
| | (p.Tyr180His) | | | CCACTCTCTAGCATCCTGGA′] |
| 904 | NM_016335.4(PRODH): c.1322T > | 5625 | PRODH | [′CTGGGCCAGGTATGCGCCCCGCACCRGCTTG |
| | C (p.Leu441Pro) | | | GCCCCAAAACACCAGCCCTC′] |
| 905 | NM_000152.3(GAA): c.953T > C | 2548 | GAA | [′GTGTTCCTGCTAAACAGCAATGCCAYGGGT |
| | (p.Met318Thr) | | | AAGCTGCCCGCCGCCCAGCGC′] |
| 906 | NM_012213.2(MLYCD): c.119T > | 23417 | MLYCD | [′GCGGCCGGCGCCCTGGAGCGGGCCAYGGAC |
| | C (p.Met40Thr) | | | GAGCTGCTGCGCCGCGCGGTG′] |
| 907 | NM_012464.4(TLL1): c.713T > C | 7092 | TLL1 | [′AAGAACTGTGATAAATTTGGGATTGYTGTTC |
| | (p.Val238Ala) | | | ATGAATTGGGTCATGTGATA′] |
| 908 | NM_000112.3(SLC26A2): c.- | 1836 | SLC26A2 | [′CCTGCAGCGGCCCGGACCCGAGAGGYGAGA |
| | 26 + 2T > C | | | AGAGGGAAGCGGACCAGGGAA′] |
| 909 | NM_138691.2(TMC1): c.1543T > | 117531 | TMC1 | [′CCCTGCAGATGTACCTCGAGGACCTYGCTGG |
| | C (p.Cys515Arg) | | | GAAACAATGGTGGGACAGGT′] |
| 910 | NM_138694.3(PKHD1): c.10658T > | 5314 | PKHD1 | [′GTTGTCCTACAAGGAGAGGAGCCCAYTGAA |
| | C (p.Ile3553Thr) | | | ATACGCTCAGGTGTTTCCATT′] |
| 911 | NM_001034116.1(EIF2B4): c.1393T > | 8890 | EIF2B4 | [′TGCAGATGACCCTGATGATCTGCAAYGTAA |
| | C (p.Cys465Arg) | | | GCGGGGAGAACATGTTGCGCT′] |
| 912 | NM_001034116.1(EIF2B4): c.1465T > | 8890 | EIF2B4 | [′ATCCCTACGGTTGTTGAATCTAGTCYATGAT |
| | C (p.Tyr489His) | | | GTGACTCCCCCAGAGCTTGT′] |
| 913 | NM_018960.4(GNMT): c.149T > | 27232 | GNMT | [′ACCGCCGAGTACAAGGCATGGCTGCYTGGG |
| | C (p.Leu50Pro) | | | CTGCTGCGCCAGCACGGCTGC′] |
| 914 | NM_181457.3(PAX3): c.268T > C | 5077 | PAX3 | [′CTGCGTCTCCAAGATCCTGTGCAGGYACCAG |
| | (p.Tyr90His) | | | GAGACTGGCTCCATACGTCC′] |
| 915 | NM_024301.4(FKRP): c.899T > C | 79147 | FKRP | [′GAGACCACGCGCTGCTTCGGAACCGYGGTG |
| | (p.Val300Ala) | | | GGCGACACGCCCGCCTACCTC′] |
| 916 | NM_021020.3(LZTS1): c.85T > C | 11178 | LZTS1 | [′TTCGCAGTACAAGCTGCGCAAGTCCYCCCAC |
| | (p.Ser29Pro) | | | CTCAAGAAGCTCAACCGGTA′] |
| 917 | NM_005857.4(ZMPSTE24): c.1018T > | 10269 | ZMPSTE24 | [′TGTACTAGGCCATGAACTGGGGCACYGGAA |
| | C (p.Trp340Arg) | | | GTTGGGACATACAGTCAAAAA′] |
| 918 | NM_017838.3(NHP2): c.415T > C | 55651 | NHP2 | [GCCCCATGAGGAGTACCAGGAGGCTYACGA |
| | (p.Tyr139His) | | | TGAGTGCCTGGAGGAGGTGCA′] |
| 919 | NM_000157.3(GBA): c.1448T > C | 2629 | GBA | [′GGGATGCATCAGTGCCACTGCGTCCVGGTC |
| | (p.Leu483Pro) | | | GTTCTTCTGACTGGCAACCAG′] |
| 920 | NM_001005741.2(GBA): c.751T > | 2629 | GBA | [′CATCTACCACCAGACCTGGGCCAGAYACTTT |
| | C (p.Tyr251His) | | | GTGAAGTAAGGGATCAGCAA′] |
| 921 | NM_001243133.1(NLRP3): c.1718T > | 114548 | NLRP3 | [′AAATTCGAAAAGGGGTATTTGATTTYTGTTG |
| | C (p.Phe573Ser) | | | TACGTTTCCTCTTTGGCCTG′] |
| 922 | NM_001243133.1(NLRP3): c.926T > | 114548 | NLRP3 | [′GGCTTCGATGAGCTGCAAGGTGCCTYTGAC |
| | C (p.Phe309Ser) | | | GAGCACATAGGACCGCTCTGC′] |
| 923 | NM_001243133.1(NLRP3): c.1058T > | 114548 | NLRP3 | [′CTCATCACCACGAGACCTGTGGCCCYGGAG |
| | C (p.Leu353Pro) | | | AAACTGCAGCACTTGCTGGAC′] |
| 924 | NM_057176.2(BSND): c.35T > C | 7809 | BSND | [′GAGAAGACCTTCCGGATCGGCTTCAYTGTGC |
| | (p.Ile12Thr) | | | TGGGGCTTTTCCTGCTGGCC′] |
| 925 | NM_001195794.1(CLRN1): c.488T > | 7401 | CLRN1 | [′TCTGTTGCAGGCTCCTGTGGCTGTCYTGTCA |
| | C (p.Leu163Pro) | | | TGATATTGTTTGCCTCTGAA′] |
| 926 | NM_175073.2(APTX): c.668T > C | 54840 | APTX | [′GCTGTGGCCAGGGAACACCTTGAACYCCTT |
| | (p.Leu223Pro) | | | AAGCATATGCACACTGTGGGG′] |
| 927 | NM_020365.4(E1F2B3): c.1037T > | 8891 | EIF2B3 | [′CCACCAGTCCATTCGTCAGCCCAGAYTGTCA |
| | C (p.Ile346Thr) | | | GCAAACACCTGGTAAGTGCT′] |
| 928 | NM_031433.3(MFRP): c.545T > C | −1 | — | [′ATCCAGGTGGCCACAGACCATGCAAYACAG |
| | (p.Ile182Thr) | | | CTCAAGATCGAAGCCCTCAGC′] |
| 929 | NM_016180.4(SLC45A2): c.1082T > | 51151 | SLC45A2 | [′AGTGCACACAACTCCACAGAGTTTCYCATCT |
| | C (p.Leu361Pro) | | | ACGAAAGAGGAGTCGAGGTT′] |
| 930 | NM_006005.3(VVFS1): c.2486T > | 7466 | WFS1 | [′AGCCTCATCGAGTTCAGCACCATCCYGGAG |
| | C (p.Leu829Pro) | | | GGCCGCCTGGGCAGCAAGTGG′] |
| 931 | NM_024960.4(PANK2): c.178T > | 80025 | PANK2 | [′GATCAAAGGAATTTTATACATTGACYCAGTC |
| | C (p.Ser60Pro) | | | GGATTCAATGGACGGTCACA′] |
| 932 | NM_024960.4(PANK2): c.437T > | 80025 | PANK2 | [′ACCACTTTTGAAGAAGCTCTTGAAAYGGCAT |
| | C (p.Met146Thr) | | | CTCGTGGAGATAGCACCAAA′] |
| 933 | NM_020427.2(SLURP1): c.43T > | 57152 | SLURP1 | [′TGTGCAGCTGCTGCTCGTGGCAGCCYGGAG |
| | C (p.Trpl5Arg) | | | CATGGGCTGTGGTGAGTGGGC′] |
| 934 | NM_020427.2(SLURP1): c.229T > | 57152 | SLURP1 | [′GGTGACCCGCTCCTGCTCCAGCTCCYGTGTG |
| | C (p.Cys77Arg) | | | GCCACCGACCCCGACAGCAT′] |
| 935 | NM_021830.4(C10orf2): c.1142T > | 56652 | C10orf2 | [′CTTCGGGAGGAGGTGCTAGGAGAACBGTCA |
| | C (p.Leu381Pro) | | | AATGTGGAGCAAGCAGCTGGC′] |
| 936 | NM_001033855.2(DCLRE1C): c. | 64421 | DCLRE1C | [′CCGGACTCTGGGATCGGCGGCGCTAYGAGT |
| | 2T > C (p.Met1Thr) | | | TCTTTCGAGGGGCAGATGGCC′] |
| 937 | NM_153741.1(DPM3): c.254T > C | 54344 | DPM3 | [′CAGATACAGGAGGCCCGAGCCGACTYAGCC |
| | (p.Leu85Ser) | | | CGCAGGGGGCTGCGCTTCTGA′] |
| 938 | NM_000441.1(SLC26A4): c.707T > | 5172 | SLC26A4 | [′GCCTTCCAAGTGCTGGTCTCACAGCYAAAG |
| | C (p.Leu236Pro) | | | ATTGTCCTCAATGTTTCAACC′] |
| 939 | NM_000441.1(SLC26A4): c.1588T > | 5172 | SLC26A4 | [′TGGAAGCATCCCTAGCACAGATATCYACAA |
| | C (p.Tyr530His) | | | AAGTACCAAGAATTACAAAAA′] |
| 940 | NM_000441.1(SLC26A4): c.- | −1 | — | [CTTTCCCTTCGACCAAGGTGTCTGTYGCTCC |
| | 103T > C | | | GTAAATAAAACGTCCCACTG′] |
| 941 | NM_000441.1(SLC26A4): c.1003T > | 5172 | SLC26A4 | [′ATTTTTCACTTAAAAACTCACTAGGHTTTTG |
| | C (p.Phe335Leu) | | | CCTCCTGAACTTCCACCTGT′] |
| 942 | NM_022458.3(LMBR1): c.423 + | 64327 | LMBR1 | [′AACAAAGATTTTTTTAATATGTTTCYATCCT |
| | 4842T > C | | | GTGTCACAGTTTGAAATTGT′] |
| 943 | NM_022458.3(LMBR1): c.423 + | 64327 | LMBR1 | [′AAAGCTGAGCAACATGACAGCACAAYAGAG |
| | 4808T > C | | | GAGGAACAAAGATTTTTTTAA′] |
| 944 | NM_145693.2(LPIN1): c.1441 + | 23175 | LPIN1 | [′GCGACCACCGGGAGATCACGAAAGGYACCG |
| | 2T > C | | | CGGGCCTCGCGCGGGCGCCCT′] |
| 945 | NM_022124.5(CDH23): c.5663T > | 64072 | CDH23 | [′AGTGGCTGCAATGCACGCCTCACCTYCAAC |
| | C (p.Phe1888Ser) | | | ATCACTGCGGGCAACCGCGAG′] |
| 946 | NM_153212.2(GJB4): c.409T > C | 127534 | GJB4 | [′GTGGACGTACTTGCTGAGCCTCATCYTCAAG |
| | (p.Phe137Leu) | | | GCCGCCGTGGATGCTGGCTT′] |
| 947 | NM_021044.2(DHH): c.2T > C | 50846 | DHH | [′TTTTGGCCGAGGTCCGCTGTATCCAYGGCTC |
| | (p.Met1Thr) | | | TCCTGACCAATCTACTGCCC′] |
| 948 | NM_021044.2(DHH): c.485T > C | 50846 | DHH | [′CGCGACCGCAACAAGTATGGGTTGCYGGCG |
| | (p.Leu162Pro) | | | CGCCTCGCAGTGGAAGCCGGC′] |
| 949 | NM_020638.2(FGF23): c.287T > | 8074 | FGF23 | [′GTGATGAGCAGAAGATACCTCTGCAYGGAT |
| | C (p.Met96Thr) | | | TTCAGAGGCAACATTTTTGGA′] |
| 950 | NM_022041.3(GAN): c.1268T > C | 8139 | GAN | [′TGCTATGCAGCTATGAAAAAGAAAAYCTAC |
| | (p.Ile423Thr) | | | GCCATGGGTGGAGGCTCCTAC′] |
| 951 | NM_015665.5(AAAS): c.787T > C | 8086 | AAAS | [′CAGTGGGGGGCGGCTGCTCTCAGCTYCACC |
| | (p.Ser263Pro) | | | CGTGGATGCTGCTATCCGGGT′] |
| 952 | NM_021615.4(CHST6): c.827T > | 4166 | CHST6 | [′TACCGCCTGGTGCGCTTCGAGGACCYGGCG |
| | C (p.Leu276Pro) | | | CGGGAGCCGCTGGCAGAAATC′] |
| 953 | NM_000368.4(TSC1): c.539T > C | 7248 | TSC1 | [′GTGGCGGAAGTCTATCTCGTCCATCYCCATG |
| | (p.Leu180Pro) | | | CCAGTGTGTACGCACTCTTT′] |
| 954 | NM_020661.2(AICDA): c.238T > | 57379 | AICDA | [′CCCTGGCCGCTGCTACCGCGTCACCYGGTTC |
| | C (p.Trp80Arg) | | | ACCTCCTGGAGCCCCTGCTA′] |
| 955 | NM_020661.2(AICDA): c.317T > | 57379 | AICDA | [′CTGCGAGGGAACCCCAACCTCAGTCYGAGG |
| | C (p.Leu106Pro) | | | ATCTTCACCGCGCGCCTCTAC′] |
| 956 | NM_020661.2(AICDA): c.452T > | 57379 | AICDA | [′GATTATTTTTACTGCTGGAATACTTYTGTAG |
| | C (p.Phe151Ser) | | | AAAACCACGAAAGAACTTTC′] |
| 957 | NM_020632.2(ATP6V0A4): c. | 50617 | ATP6V0A4 | [′ATCATTCTGCAATTTATCCCTGAGAYGATTT |
| | 1739T > C (p.Met580Thr) | | | TTATCCTGTGTCTGTTTGGA′] |
| 958 | NM_054027.4(ANKH): c.143T > | 56172 | ANKH | [′GCTGTCAAGGAGGATGCAGTCGAGAYGCTG |
| | C (p.Met48Thr) | | | GCCAGCTACGGGCTGGCGTAC′] |
| 959 | NM_054027.4(ANKH): c.1015T > | 56172 | ANKH | [′TGTTTGATGTCTTTCTCCCCAGCTCYGTTTCG |
| | C (p.Cys339Arg) | | | TGATGTTTTGGACACCCAA′] |
| 960 | NM_054027.4(ANKH): c.1172T > | −1 | — | [′GTGAGGGCGCATCTCACCGGGTGGCYGATG |
| | C (p.Leu391Pro) | | | ACACTGAAGAAAACCTTCGTC′] |
| 961 | NM_016373.3(WWOX): c.872T > | 51741 | WWOX | [′ACAAAAAACGACTATTGGGCGATGCYGGCT |
| | C (p.Leu291Pro) | | | TATAACAGGTCCAAGCTCTGC′] |
| 962 | NM_021102.3(SPINT2): c.337 + | 10653 | SPINT2 | [′CAGCGGATTCCTCTGTCCCAAGTGGYAGGTT |
| | 2T > C | | | CTTAAAGAGACCCGCGATGG′] |
| 963 | NM_014588.5(VSX1): c.50T > C | 30813 | VSX1 | [′GACGGGCGCACTAGCAGCAGGGCGCYGGTG |
| | (p.Leu17Pro) | | | CCTGGCGGTTCCCCTAGGGGC′] |
| 964 | NM_006946.2(SPTBN2): c.758T > | 6712 | SPTBN2 | [′GAAAAGGAACTGGGACTTACCAAGCYGCTG |
| | C (p.Leu253Pro) | | | GATCCCGAAGGTGGGGCCAGA′] |
| 965 | NM_012452.2(TNFRSF13B): c. | 23495 | TNFRSF13B | [′GCACCCTAAGCAATGTGCATACTTCYGTGAG |
| | 310T > C (p.Cys104Arg) | | | AACAAGCTCAGGAGCCCAGT′] |
| 966 | NM_170784.2(MKKS): c.830T > | 8195 | MKKS | [′GAAAATGCAGTCTTGGACCAGCTGCYTAAC |
| | C (p.Leu277Pro) | | | CTAGGAAGGCAGCTAATCAGT′] |
| 967 | NM_015717.4(CD207): c.790T > | 50489 | CD207 | [′AATGGCGTGTCATCCACCCAGGACCRGTCCC |
| | C (p.Trp264Arg) | | | CTTCCATCCCTGCTTTAGTC′] |
| 968 | NM_153717.2(EVC): c.919T > C | 2121 | EVC | [′TGTGGAAAAGAAGGAGAGAGAATACYCTGA |
| | (p.Ser307Pro) | | | ACAGCTAATCGATAATGTGCG′] |
| 969 | NM_014384.2(ACAD8): c.455T > | 27034 | ACAD8 | [′AAATTTTGCCCACCGCTCTGTACCAYGGAGA |
| | C (p.Met152Thr) | | | AGTTTGCTTCCTACTGCCTC′] |
| 970 | NM_004924.4(ACTN4): c.784T > | 81 | ACTN4 | [′CGAGAAGGCCATAATGACCTATGTGYCCAG |
| | C (p.Ser262Pro) | | | CTTCTACCATGCCTTTTCAGG′] |
| 971 | NM_005097.3(LGI1): c.136T > C | 9211 | LGI1 | [′AGCGAAGCCAAAATGCCCTGCCGTGYGTAC |
| | (p.Cys46Arg) | | | TTGTACCAAAGATAATGCTTT′] |
| 972 | NM_005097.3(LGI1): c.695T > C | 9211 | LGI1 | [′GCAGAATTTGCAAAGTCTCAAGACCYGCCTT |
| | (p.Leu232Pro) | | | ATCAATCATTGTCCATAGAC′] |
| 973 | NM_006329.3(FBLN5): c.679T > | 10516 | FBLN5 | [′GCAAACCTGCGTCAACACCTACGGCYCTTTC |
| | C (p.Ser227Pro) | | | ATCTGCCGCTGTGACCCAGG′] |
| 974 | NM_006329.3(FBLN5): c.506T > | 10516 | FBLN5 | [′TTGCTTGCATTTCTGTTTCCAGACAYTGATG |
| | C (p.Ile169Thr) | | | AATGTCGCTATGGTTACTGC′] |
| 975 | NM_013339.3(ALG6): c.1432T > | 29929 | ALG6 | [′GTTTTCTGTATTGGTGTGTTTTGTAYCTTGCT |
| | C (p.Ser478Pro) | | | TGAACTTCCTGTTCTTCTT′] |
| 976 | NM_006899.3(IDH3B): c.395T > | 3420 | IDH3B | [′GAGCTAGCCTCCTATGATATGCGGCYGAGG |
| | C (p.Leu132Pro) | | | TAGGTGGTCTGGGTGGGGTGA′] |
| 977 | NM_014363.5(SACS): c.5836T > | 26278 | SACS | [′AATGGATTATACTTACTATGCAGTAYGGCCC |
| | C (p.Trp1946Arg) | | | GATCCTGATTTAGTTCATGA′] |
| 978 | NM_014363.5(SACS): c.9742T > | 26278 | SACS | [′AAGTGAGTCTTGGCTTAAGAATGCAYGGCA |
| | C (p.Trp3248Arg) | | | TTTTATTAGTGAATCTGTAAG′] |
| 979 | NM_014363.5(SACS): c.3161T > | 26278 | SACS | [′CAGATGGTATCAGCTGGTGAACTCTYTGACC |
| | C (p.Phe1054Ser) | | | CTGATATAGAAGTACTAAAG′] |
| 980 | NM_014324.5(AMACR): c.154T > | −1 | — | [′GAGCCGCTTGGGCCGGGGCAAGCGCYCGCT |
| | C (p.Ser52Pro) | | | AGTGCTGGACCTGAAGCAGCC′] |
| 981 | NM_014324.5(AMACR): c.320T > | −1 | — | [′AATCCAAGGCTTATTTATGCCAGGCYGAGTG |
| | C (p.Leu107Pro) | | | GATTTGGCCAGTCAGGAAGC′] |
| 982 | NM_001040108.1(MLH3): c.3826T > | 27030 | MLH3 | [′GACAGAGGAACAAAGGAGACTCTTAYGGTC |
| | C (p.T1p1276Arg) | | | AGTACCACCATGAGAATGTGA′] |
| 983 | NM_014336.4(A1PL1): c.715T > C | 23746 | AIPL1 | [′TACTCTGATCCTCAACTACTGCCAGYGCCTG |
| | (p.Cys239Arg) | | | CTGAAGAAGGAGGAGTACTA′] |
| 984 | NM_001001486.1(ATP2C1): c. | 27032 | ATP2C1 | [′CTCTCATTTGCTTTAGCCAGTCGTCYGGGAT |
| | 1751T > C (p.Leu584Pro) | | | TGTATTCCAAAACTTCCCAG′] |
| 985 | NM_007194.3(CHEK2): c.470T > | 11200 | CHEK2 | [′GAAGTGGGTCCTAAAAACTCTTACAYTGCAT |
| | C (p.Ile157Thr) | | | ACATAGAAGATCACAGTGGC′] |
| 986 | NM_007255.2(B4GALT7): c.617T > | 11285 | B4GALT7 | [′ACCTATGTCGGCGGCATCCTGCTGCYCTCCA |
| | C (pLeu206Pro) | | | AGCAGCACTACCGGCTGGTG′] |
| 987 | NM_000030.2(AGXT): c.613T > C | 189 | AGXT | [′ATCTACAGGCATCGACATCCTGTACYCGGGC |
| | (p.Ser205Pro) | | | TCCCAGAAGGCCCTGAACGC′] |
| 988 | NM_000030.2(AGXT): c.731T > C | 189 | AGXT | [′AAGCCCTTCTCCTTCTACCTGGACAYCAAGT |
| | (p.Ile244Thr) | | | GGCTGGCCAACTTCTGGGGC′] |
| 989 | NM_201253.2(CRB1): c.3122T > | 23418 | CRB1 | [′ACATGGCACGAAGTGACCCTTTCCAYGACA |
| | C (p.Met1041Thr) | | | GACCCACTGTCCCAGACCTCC′] |
| 990 | NM_201253.2(CRB1): c.3541T > | 23418 | CRB1 | [′ACACTGTGAACTCAACATCGATGAAYGCTTT |
| | C (p.Cys1181Arg) | | | TCAAACCCCTGTATCCATGG′] |
| 991 | NM_005094.3(SLC27A4): c.739T > | 10999 | SLC27A4 | [′AGATAAACTGTTCTACATCTACACAYCCGGC |
| | C (p.Ser247Pro) | | | ACCACAGGGCTGCCCAAGGC′] |
| 992 | NM_032551.4(KISS1R): c.443T > | 84634 | KISS1R | [′CGCTGGTACGTGACGGTGTTCCCGTYGCGCG |
| | C (p.Leu148Ser) | | | CCCTGCACCGCCGCACGCCC′] |
| 993 | NM_032551.4(KISS1R): c.305T > | 84634 | KISS1R | [′TGCTGCGTCCCCTTCACGGCCCTGCYGTACC |
| | C (p.Leu102Pro) | | | CGCTGCCCGGCTGGGTGCTG′] |
| 994 | NM_014270.4(SLC7A9): c.131T > | 11136 | SLC7A9 | [′ATCTCCATCATCGTGGGCACCATCAYTGGCT |
| | C (p.Ile44Thr) | | | CTGGGATCTTCGTTTCCCCC′] |
| 995 | NM_003332.3(TYROBP): c.2T > | 7305 | TYROBP | [′TGGTGTCCAGCAGCATCCGGCTTCAYGGGG |
| | C (p.Met1Thr) | | | GGACTTGAACCCTGCAGCAGG′] |
| 996 | NM_000843.3(GRM6): c.1214T > | −1 | — | [′CAGGAGGGCAAGGTGCAGTTTGTGAYTGAT |
| | C (p.Ile405Thr) | | | GCGGTGTACGCCATTGCCCAC′] |
| 997 | NM_022336.3(EDAR): c.259T > C | 10913 | EDAR | [′GTTTTCCAAAGGAGGCTACCAGATAYGCAG |
| | (p.Cys87Arg) | | | GCGTCACAAAGACTGTGAGGG′] |
| 998 | NM_003835.3(RGS9): c.895T > C | 8787 | RGS9 | [′CCCAACCAAGATGCGAGTGGAACGAYGGGC |
| | (p.Trp299Arg) | | | CTTCAACTTCAGCGAATTGAT′] |
| 999 | NM_004870.3(MPDU1): c.356T > | 9526 | MPDU1 | [′CTCCAGACGATCACCATCTGCTTCCYGGTCA |
| | C (p.Leu119Pro) | | | TGCACTACAGAGGACAGACT′] |
| 1000 | NM_004870.3(MPDU1): c.2T > C | 9526 | MPDU1 | [′ACTGGCGGAAGCTAGCTTTGCAATAYGGCG |
| | (p.Met1Thr) | | | GCCGAGGCGGACGGACCGCTT′] |
| 1001 | NM_004870.3(MPDU1): c.221T > | 9526 | MPDU1 | [′CTGGGAGCCAAGAGTGCTGAAGGGTYGAGT |
| | C (p.Leu74Ser) | | | CTCCAGTCTGTAATGCTGGAG′] |
| 1002 | NM_000334.4(SCN4A): c.2078T > | 6329 | SCN4A | [′ACGCTGAACATGCTCATCAAGATCAYTGGC |
| | C (p.Ile693Thr) | | | AATTCAGTGGGGGCGCTGGGT′] |
| 1003 | NM_006580.3(CLDN16): c.500T > | 10686 | CLDN16 | [′GCTGGGTTTGGATTTCTCACCCTGCYCCTTG |
| | C (p.Leu167Pro) | | | GTCTTGACTGCGTGAAATTC′] |
| 1004 | NM_006580.3(CLDN16): c.434T > | 10686 | CLDN16 | [′ATATGCCCTGGTCTTCCAGTGAAGCYGGTGG |
| | C (p.Leu145Pro) | | | TAACTCGAGCGTTGATGATT′] |
| 1005 | NM_003907.2(EIF2B5): c.1882T > | 8893 | EIF2B5 | [′CTTTCTTCCATAGCTGCTAAAGGCCYGGAGC |
| | C (p.Trp628Arg) | | | CCTGTTTTTAGGAACTACAT′] |
| 1006 | NM_183235.2(RAB27A): c.389T > | 5873 | RAB27A | [′TATTGTGAAAACCCAGATATAGTGCYGTGTG |
| | C (p.Leu130Pro) | | | GAAACAAGAGTGATCTGGAG′] |
| 1007 | NM_001128227.2(GNE): c.2228T > | 10020 | GNE | [′CCCGCCCTGCTGGGTGCTGCCAGCAYGGTTC |
| | C (p.Met743Thr) | | | TGGACTACACAACACGCAGG′] |
| 1008 | NM_004273.4(CHST3): c.776T > | 9469 | CHST3 | [′CGCTGCGGCCCCCTCAACGTGACGCYGGCC |
| | C (p.Leu259Pro) | | | GCAGAGGCCTGCCGCCGCAAG′] |
| 1009 | NM_004273.4(CHST3): c.920T > | 9469 | CHST3 | [′CTGGTGCGCGACCCCCGGGCCGTGCYGGCC |
| | C (p.Leu307Pro) | | | TCGCGCATGGTGGCCTTCGCC′] |
| 1010 | NM_004273.4(CHST3): c.857T > | 9469 | CHST3 | [′CGGCAGCTGGAGTTCCTGCAGCCGCYGGCC |
| | C (p.Leu286Pro) | | | GAGGACCCCCGCCTGGACCTG′] |
| 1011 | NM_172201.1(KCNE2): c.161T > | 9992 | KCNE2 | [′TTCTACTATGTCATCCTGTACCTCAYGGTGA |
| | C (p.Met54Thr) | | | TGATTGGAATGTTCTCTTTC′] |
| 1012 | NM_172201.1(KCNE2): c.170T > | 9992 | KCNE2 | [′GTCATCCTGTACCTCATGGTGATGAYTGGAA |
| | C (p.Ile57Thr) | | | TGTTCTCTTTCATCATCGTG′] |
| 1013 | NM_172201.1(KCNE2): c.178T > | 9992 | KCNE2 | [′GTACCTCATGGTGATGATTGGAATGHTCTCT |
| | C (p.Phe60Leu) | | | TTCATCATCGTGGCCATCCT′] |
| 1014 | NM_001139.2(ALOX12B): c.1277T> | 242 | ALOX12B | [′TCATCCTCCTTGCTCTCCCCACAGCYCCTCA |
| | > C (p.Leu426Pro) | | | TCCCCCATACCCGATACACC′] |
| 1015 | NM_003640.3(IKBKAP): c.2204 + | 8518 | IKBKAP | [′ATTCGGAAGTGGTTGGACAAGTAAGYGCCA |
| | 6T > C | | | TTGTACTGTTTGCGACTAGTT′] |
| 1016 | NM_005413.3(SIX3): c.749T > C | 6496 | SIX3 | [′GCCACCGGCCTCACTCCCACACAAGYAGGC |
| | (p.Val250Ala) | | | AACTGGTTTAAGAACCGGCGG′] |
| 1017 | NM_004820.3(CYP7B1): c.647T > | 9420 | CYP7B1 | [HITATTAGTGAGCTAAGAGATGATTYTTTAA |
| | C (p.Phe216Ser) | | | AATTTGATGACAAGTTTGCA′] |
| 1018 | NM_194248.2(OTOF): c.3032T > | 9381 | OTOF | ′CTGTGTCCCACCTGGGACCAGATGCYGGTGT |
| | C (p.Leu1011Pro) | | | TCGACAACCTGGAGCTCTAT] |
| 1019 | NM_194248.2(OTOF): c.1544T > | 9381 | OTOF | [′GACGTGGCCATCGGCACCCACTTCAYTGACC |
| | C (p.Ile515Thr) | | | TGCGCAAGATTTCTAATGAC′] |
| 1020 | NM_004737.4(LARGE): c.1483T > | 9215 | LARGE | [′GATGCTGGAGGCCATCTGCAAGCACYGGGA |
| | C (p.Trp495Arg) | | | GGGGCCCATCAGCCTGGCCCT′] |
| 1021 | NM_002420.5(TRPM1): c.296T > | 4308 | TRPM1 | [′GAGGCCTCCATGCACAGATATTAAGRGCTTG |
| | C (p.Leu99Pro) | | | GGGAGTTCCAGCTGCCAATC′] |
| 1022 | NM_004700.3(KCNQ4): c.842T > | 9132 | KCNQ4 | [′ACCTGTTTGTGTCTCCAGATTACATYGACAA |
| | C (p.Leu281Ser) | | | CCATCGGCTATGGTGACAAG′] |
| 1023 | NM_003839.3(TNFRSF11A): c. | 8792 | TNFRSF11 | [′ACTGAACCACCTTTTCCCCCACAGCYGTACC |
| | 523T > C (p.Cys175Arg) | | | TTCCTTGGAAAGAGAGTAGA′] |
| 1024 | NM_030761.4(WNT4): c.35T > C | 54361 | WNT4 | [′CGCTCGTGCCTGCGTTCGCTGCGCCYCCTCG |
| | (p.Leu12Pro) | | | TCTTCGCCGTCTTCTCAGCC′] |
| 1025 | NM_000050.4(ASS1): c.535T > C | 445 | ASS1 | [′CATCCCGGTCACTCCCAAGAACCCGYGGAG |
| | (p.Trp179Arg) | | | CATGGATGAGAACCTCATGCA′] |
| 1026 | NM_002977.3(SCN9A): c.2543T > | −1 | — | [′ACATTGAACATGCTGATTAAGATCAYTGGTA |
| | C (p.Ile848Thr) | | | ACTCAGTAGGGGCTCTAGGT′] |
| 1027 | NM_002977.3(SCN9A): c.4382T > | −1 | — | [′TTTCTTTACCTTGGAGGTCAAGACAYCTTTA |
| | C (p.Ile1461Thr) | | | TGACAGAAGAACAGAAGAAA′] |
| 1028 | NM_002977.3(SCN9A): c.647T > | 6335 | SCN9A | [′GGCAATGTTTCAGCTCTTCGAACTTYCAGAG |
| | C (p.Phe216Ser) | | | TATTGAGAGCTTTGAAAACT′] |
| 1029 | NM_003880.3(WISP3): c.232T > | 8838 | WISP3 | [′AGATGGCTGTGGATGCTGTAAAATCYGTGC |
| | C (p.Cys78Arg) | | | CAAGCAACCAGGGGAAATCTG′] |
| 1030 | NM_003880.3(WISP3): c.1000T > | 8838 | WISP3 | [′TAAATGGAAGATGCTGTGGATTACAYCTTGT |
| | C (p.Ser334Pro) | | | GTGTGTCAGAGAAACTGCAG′] |
| 1031 | NM_001457.3(FLNB): c.703T > C | 2317 | FLNB | [′CGAGCACTCAGTTATGACTTACCTGYCCCAG |
| | (p.Ser235Pro) | | | TTCCCCAAAGCCAAGCTCAA′] |
| 1032 | NM_003060.3(SLC22A5): c.1051T > | 6584 | SLC22A5 | [′GATTTGTTACTGACAAGGCCTAGGGNAAGTT |
| - | C (p.Trp351Arg) | | | TTCACAGCCTAAAACACAGT′, |
| 1036 | | | | ′TACAAGACCTAAGTTCCAAGAAGCARCAGTC |
| | | | | CCACAACATTCTGGATCTGC′, |
| | | | | ′GGTCACCATCATGTCCATAATGCTGYGGTAT |
| | | | | GTAAAAGAGACCTGCCTGAG′, |
| | | | | ′ATGCCTCAGACAAAATTCAAAGCCTRTGTCA |
| | | | | TCAGAGAGTGAAAAGGATAT′, |
| | | | | ′GGCTGTTGTGGGAAATATGGACTCTYGTGGG |
| | | | | GAATCTCTCCAGATCTTAAG′] |
| 1037 | NM_000369.2(TSHR): c.1891T > | 7253 | TSHR | [′TGCCAAGAGGATGGCTGTGTTGATCYTCACC |
| | C (p.Phe631Leu) | | | GACTTCATATGCATGGCCCC′] |
| 1038 | NM_000369.2(TSHR): c.1358T > | 7253 | TSHR | [′AAACTGAACGTCCCCCGCTTTCTCAYGTGCA |
| | C (p.Met453Thr) | | | ACCTGGCCTTTGCGGATTTC′] |
| 1039 | NM_000369.2(TSHR): c.1526T > | 7253 | TSHR | [′ACTGTCTTTGCAAGCGAGTTATCGGYGTATA |
| | C (p.Val509Ala) | | | CGCTGACGGTCATCACCCTG′] |
| 1040 | NM_000369.2(TSHR): c.1798T > | 7253 | TSHR | [′AGTTGCCTTCGTCATCGTCTGCTGCYGTTAT |
| | C (p.Cys600Arg) | | | GTGAAGATCTACATCACAGT′] |
| 1041 | NM_000369.2(TSHR): c.1400T > | 7253 | TSHR | [′GCGGATTTCTGCATGGGGATGTACCYGCTCC |
| | C (p.Leu467Pro) | | | TCATCGCCTCTGTAGACCTC′] |
| 1042 | NM_001003722.1(GLE1): c.2051T > | 2733 | GLE1 | [′CAGAAATGTTTGCAACACAAGGACAYTCCT |
| | C (p.Ile684Thr) | | | GTCCCCAAGGGCTTTCTGACT′] |
| 1043 | NM_024009.2(GJB3): c.101T > C | 2707 | GJB3 | [′TCCGTGGTGTTCGTCTTCCGGGTGCYGGTAT |
| | (p.Leu34Pro) | | | ACGTGGTGGCTGCAGAGCGC′] |
| 1044 | NM_001080463.1(DYNC2H1): c. | 79659 | DYNC2H1 | [′GATTTGCTCAGAGTAGCTGATACAAYTGTAG |
| | 3719T > C (p.Ile1240Thr) | | | CCAAAGCTGCCGACCTTAAA′] |
| 1045 | NM_018129.3(PNPO): c.784T > C | 55163 | PNPO | [CTGGCTCTATGAGAGACTTGCACCTYAACTC |
| | (p.Ter262Gln) | | | TGGGACCTGCTGGCCCAGAG′] |
| 1046 | NM_003722.4(TP63): c.1033T > C | 8626 | TP63 | [′CCGACGCTGCTTTGAGGCCCGGATCYGTGCT |
| | (p.Cys345Arg) | | | TGCCCAGGAAGAGACAGGAA′] |
| 1047 | NM_003722.4(TP63): c.1646T > C | 8626 | TP63 | [′CCTCCGTATCCCACAGATTGCAGCAYTGTCA |
| | (p.Ile549Thr) | | | GGTGAGTCCACAGCATGTGC′] |
| 1048 | NM_003722.4(TP63): c.1738T > C | 8626 | TP63 | [′CACCATCTATCAGATTGAGCATTACBCCATG |
| | (p.Ser580Pro) | | | GATGTAAGTAACTGTTAGAC′] |
| 1049 | NM_004086.2(COCH): c.349T > C | −1 | — | [′CATCCAGTCTCAAATGCTTTCTAGAYGGTCT |
| | (p.Trp117Arg) | | | GCTTCTTTCACAGTAACTAG′] |
| 1050 | NM_004086.2(COCH): c.1535T > | −1 | — | [′GCACCTCTGGATGACCTGAAAGATAYGGCT |
| | C (p.Met512Thr) | | | TCTAAACCGAAGGAGTCTCAT′] |
| 1051 | NM_006412.3(AGPAT2): c.683T > | 10555 | AGPAT2 | [′ACAGGAACAGTCACAGTGCAGGTGCYGGAA |
| | C (p.Leu228Pro) | | | GCCATCCCCACCAGCGGCCTC′] |
| 1052 | NM_003659.3(AGPS): c.1406T > | 8540 | AGPS | [′AATCAGCTAAGTGTAGCCACATTACYGTTTG |
| | C (p.Leu469Pro) | | | AGGGGGATCGTGAGAAGGTT′] |
| 1053 | NM_004550.4(NDUFS2): c.1237T > | 4720 | NDUFS2 | [′GGGAGAGTTTGGGGTGTACCTGGTGYCTGA |
| | C (p.Ser413Pro) | | | TGGCAGCAGCCGCCCTTATCG′] |
| 1054 | NM_006892.3(DNMT3B): c.808T > | 1789 | DNMT3B | [′CCAGTGGTTTGGCGATGGCAAGTTCYCCGA |
| | C (p.Ser270Pro) | | | GGTGAGTCCGGGGAAGGGCAA′] |
| 1055 | NM_002538.3(OCLN): c.656T > C | 100506658 | OCLN | [′CAAATATATGCCCTCTGCAACCAATYTTATA |
| | (p.Phe219Ser) | | | CACCTGCAGCTACTGGACTC′] |
| 1056 | NM_001211.5(BUB1B): c.3035T > | −1 | — | [′AATGATGAGGCCACAGTGTCTGTTCYTGGG |
| | C (p.Leu1012Pro) | | | GAGCTTGCAGCAGAAATGAAT′] |
| 1057 | NM_016203.3(PRKAG2): c.1459T > | 51422 | PRKAG2 | [′ACAGAATCTTGCTGCTGAGAAAACAYACAA |
| | C (p.Tyr487His) | | | TAACCTAGATATCACGGTGAC′] |
| 1058 | NM_016203.3(PRKAG2): c.1642T > | 51422 | PRKAG2 | [′TAGTATTGTGGGTATTATTTCCCTGYCGGAC |
| | C (p.Ser548Pro) | | | ATTCTGCAAGCCCTGATCCT′] |
| 1059 | NM_001287.5(CLCN7): c.2297T > | 1186 | CLCN7 | [′TTCAAGCTGTTCCGGGCCCTGGGCCYGCGGC |
| | C (p.Leu766Pro) | | | ACCTGGTGGTGGTGGACAAC′] |
| 1060 | NM_004646.3(NPHS1): c.793T > | 4868 | NPHS1 | [′GGCAGGACAGAGCTTGGAGCTGCCGYGCGT |
| | C (p.Cys265Arg) | | | GGCCCGAGGGGGTAATCCCTT′] |
| 1061 | NM_003002.3(SDHD): c.416T > C | 6392 | SDHD | [′CTTTCAGCTTTAACCTTTGCTGGGCYTTGCT |
| | (p.Leu139Pro) | | | ATTTCAACTATCACGATGTG′] |
| 1062 | NM_001164277.1(SLC37A4): c. | 2542 | SLC37A4 | [′TAATGGCCTGGCCCAGGGGCTGGGCYGGCC |
| | 352T > C (p.Trp118Arg) | | | CCCATGTGGGAAGGTCCTGCG′] |
| 1063 | NM_002546.3(TNFRSF11B): c. | 4982 | TNFRSF11B | [′GGAAGGGCGCTACCTTGAGATAGAGYTCTG |
| | 349T > C (p.Phe117Leu) | | | CTTGAAACATAGGAGCTGCCC′] |
| 1064 | NM_005422.2(TECTA): c.5509T > | 7007 | TECTA | [′GGGCGTGAGGATCAATGACAGACAGBGCAC |
| | C (p.Cys1837Arg) | | | CGGCATCGAGGGGGAAGATTT′] |
| 1065 | NM_007262.4(PARK7): c.497T > | 11315 | PARK7 | [′CCTGGGACCAGCTTCGAGTTTGCGCYTGCAA |
| | C (p.Leu166Pro) | | | TTGTTGAAGCCCTGAATGGC′] |
| 1066 | NM_006009.3(TUBA1A): c.1190T > | 7846 | TUBA1A | [′GCTCGCCTGGACCACAAGTTTGACCYGATGT |
| | C (p.Leu397Pro) | | | ATGCCAAACGTGCCTTTGTT′] |
| 1067 | NM_002700.2(POU4F3): c.668T > | 5459 | POU4F3 | [′CTCAAGATCCCCGGCGTGGGCTCGCYGAGC |
| | C (p.Leu223Pro) | | | CAAAGCACCATCTGCAGGTTC′] |
| 1068 | NM_005025.4(SERPINI1): c.145T > | 5274 | SERPINI1 | [′TGGTGAAGATGAAAATATTCTCTTCYCTCCA |
| | C (p.Ser49Pro) | | | TTGAGTATTGCTCTTGCAAT′] |
| 1069 | NM_001040667.2(HSF4): c.341T > | 3299 | HSF4 | [′TTCGTGCGCGGCCGCGAGCAGCTACYGGAG |
| | C (p.Leu114Pro) | | | CGCGTGCGGCGCAAGGTGGGG′] |
| 1070 | NM_002942.4(ROBO2): c.2834T > | 6092 | ROBO2 | [′AATAGCAACAGTGGCCCAAATGAGAYTGGA |
| | C (p.Ile945Thr) | | | AATTTTGGCCGTGGAGGTAAG′] |
| 1071 | NM_000492.3(CFTR): c.3857T > | 1080 | CFTR | [′ACTTTGCAACAGTGGAGGAAAGCCTYTGGA |
| | C (p.Phe1286Ser) | | | GTGATACCACAGGTGAGCAAA′] |
| 1072 | NM_000492.3(CFTR): c.3763T > | 1080 | CFTR | [′TGGATCAGGGAAGAGTACTTTGTTAYCAGCT |
| | C (p.Ser1255Pro) | | | TTTTTGAGACTACTGAACAC′] |
| 1073 | NM_000492.3(CFTR): c.3194T > | 1080 | CFTR | [′ACAAGCTTAAAAGGACTATGGACACBTCGT |
| | C (p.Leu1065Pro) | | | GCCTTCGGACGGCAGCCTTAC′] |
| 1074 | NM_000492.3(CFTR): c.3469 − | 1080 | CFTR | [′TGTCTGCCATTCTTAAAAACAAAAAYGTTGT |
| | 20T > C | | | TATTTTTATTTCAGATGCGA′] |
| 1075 | NM_005603.4(ATP8B1): c.863T > | 5205 | ATP8B1 | [′TTTTGGAGAAACACAAGTTTTCCTTYGGATG |
| | C (p.Leu288Ser) | | | CTGATAAAATTTTGTTACGT′] |
| 1076 | NM_005603.4(ATP8B1): c.2097 + | 5205 | ATP8B1 | [′GAGGAGATTGAAAAAGACTTAATTGYGAGT |
| | C | | | TTTAGCCTTAATAACTTTTTC′] |
| 1077 | NM_005603.4(ATP8B1): c.1982T > | 5205 | ATP8B1 | [′ACCCTATGCCTTTGCTACAAGGAAAYTGAA |
| | C (p.Ile661Thr) | | | GAAAAAGAATTTACAGAATGG′] |
| 1078 | NM_005144.4(HR): c.-320T > C | 55806 | HR | [′CGCAGCACGGAGTCTCGGCGTCCCAYGGCG |
| | | | | CAACCTACGGCCTCGGCCCAG′] |
| 1079 | NM_003322.4(TULP1): c.1471T > | 7287 | TULP1 | [′GGTCACCCAGGCCTCAGTCAAGAACYTCCA |
| | C (p.Phe491Leu) | | | GATTGTCCACGCTGATGACCG′] |
| 1080 | NM_003322.4(TULP1): c.1145T > | 7287 | TULP1 | [CTCCTGGGGAACCGCTTCACGGTCTYTGACA |
| | C (p.Phe382Ser) | | | ACGGGCAGAACCCACAGCGT′] |
| 1081 | NM_000455.4(STK11): c.200T > | 6794 | STK11 | [′TCTTACGGCAAGGTGAAGGAGGTGCYGGAC |
| | C (p.Leu67Pro) | | | TCGGAGACGCTGTGCAGGAGG′] |
| 1082 | NM_002241.4(KCNJ10): c.418T > | 3766 | KCNJ10 | [′TGGCTTCCGCTACATCAGTGAGGAAYGTCCA |
| | C (p.Cys140Arg) | | | CTGGCCATTGTGCTTCTTAT′] |
| 1083 | NM_001172567.1(MYD88): c.317T > | 4615 | MYD88 | [′TCTGTAGGCCGACTGCTCGAGCTGCYTACCA |
| | C (p.Leu106Pro) | | | AGCTGGGCCGCGACGACGTG′] |
| 1084 | NM_000466.2(PEX1): c.1991T > | 5189 | PEX1 | [′CCATCTGTTGTCCTGCTGGATGACCYTGACC |
| | C (p.Leu664Pro) | | | TCATTGCTGGACTGCCTGCT′] |
| 1085 | NM_001303.3(COX10): c.2T > C | 1352 | COX10 | [′GGAGCGGCCCCAGACTCGTAAATTAYGGCC |
| | (p.Met1Thr) | | | GCATCTCCGCACACTCTCTCC′] |
| 1086 | NM_001300.5(KLF6): c.346T > C | 1316 | KLF6 | [′TGTCAGCAGCGAATCCTCTGACAGCYCCGA |
| | (p.Ser116Pro) | | | GGAACTTTCTCCCACGGCCAA′] |
| 1087 | NM_001300.5(KLF6): c.190T > C | 1316 | KLF6 | [′CAAATTTGACAGCCAGGAAGATCTGYGGAC |
| | (p.Trp64Arg) | | | CAAAATCATTCTGGCTCGGGA′] |
| 1088 | NM_001300.5(KLF6): c.506T > C | 1316 | KLF6 | [′CTGTGGGGTTGCGTGCCCGGGGAGCYGCCC |
| | (p.Leu169Pro) | | | TCGCCAGGGAAGGTGCGCAGC′] |
| 1089 | NM_000085.4(CLCNKB): c.1294T > | 1188 | CLCNKB | [′CGGGTACTTCATGCCCATCTTTGTCYATGGT |
| | C (p.Tyr432His) | | | GAGTCTGGGGTCCTGAGGTT′] |
| 1090 | NM_000214.2(JAG1): c.110T > C | 182 | JAG1 | [TGTGGGGCCTCGGGTCAGTTCGAGTYGGAG |
| | (p.Leu37Ser) | | | ATCCTGTCCATGCAGAACGTG′] |
| 1091 | NM_003865.2(HESX1): c.77T > C | 8820 | HESX1 | [′ACTTGCTCCTTTTCAATTGAGAGAAYCTTAG |
| | (p.Ile26Thr) | | | GACTGGACCAGAAGAAAGAC′] |
| 1092 | NM_003865.2(HESX1): c.357 + | 8820 | HESX1 | [′TCATTATTGGGTGAAAAAACTTCCCDCCTGG |
| | 2T > C | | | TTTTGAGTAAAAGCAGTTCT′] |
| 1093 | NM_002618.3(PEX13): c.977T > | 5194 | PEX13 | [′CTTGATGGCCAAACAACAGGACTTAYACCT |
| | C (p.Ile326Thr) | | | GCGAATTATGTCAAAATTCTT′] |
| 1094 | NM_000303.2(PMM2): c.395T > | 5373 | PMM2 | [′AATGGGATGTTAAACGTGTCCCCTAYTGGA |
| | C (p.Ile132Thr) | | | AGAAGCTGCAGCCAAGAAGAA′] |
| 1095 | NM_000303.2(PMM2): c.131T > | 5373 | PMM2 | [′AGGCAGAAGATCAAAATCGGAGTGGYAGGC |
| | C (p.Val44Ala) | | | GGATCGGACTTTGAGAAAGTG′] |
| 1096 | NM_000104.3(CYP1B1): c.2T > C | 1545 | CYP1B1 | [′CGCCTTCTCCTCTCTGTCCCCAGCAYGGGCA |
| | (p.Met1Thr) | | | CCAGCCTCAGCCCGAACGAC′] |
| 1097 | NM_032977.3(CASP10): c.440T > | 843 | CASP10 | [′AAAGACTCGCTTCCCAAAACTGAAAYGGTG |
| | C (p.Met147Thr) | | | AGTGGGTCATACAGAATGGGT′] |
| 1098 | NM_003999.2(OSMR): c.2072T > | 9180 | OSMR | [′GGTTCAGAATGTTGCAAATACAAAAYTGAC |
| | C (p.Ile691Thr) | | | AACCCGGAAGAAAAGGCATTG′] |
| 1099 | NM_000314.6(PTEN): c.370T > C | 5728 | PTEN | [′TGACAATCATGTTGCAGCAATTCACBGTAAA |
| | (p.Cys124Arg) | | | GCTGGAAAGGGACGAACTGG′] |
| 1100 | NM_000314.6(PTEN): c.209T > C | 5728 | PTEN | [′AAAAACCATTACAAGATATACAATCYGTAA |
| | (p.Leu70Pro) | | | GTATGTTTTCTTATTTGTATG′] |
| 1101 | NM_000314.6(PTEN): c.335T > C | 5728 | PTEN | [′TTTTGTGAAGATCTTGACCAATGGCYAAGTG |
| | (p.Leu112Pro) | | | AAGATGACAATCATGTTGCA′] |
| 1102 | NM_000314.6(PTEN): c.722T > C | 5728 | PTEN | [′CGACGGGAAGACAAGTTCATGTACTYTGAG |
| | (p.Phe241Ser) | | | TTCCCTCAGCCGTTACCTGTG′] |
| 1103 | NM_006949.3(STXBP2): c.626T > | 6813 | STXBP2 | [′TTGGCCCACGCCGTCCTGGCCAAGCHGAAC |
| | C (p.Leu209Pro) | | | GCCTTCAAGGCAGACACTCCC′] |
| 1104 | NM_000358.2(TGFBI): c.1619T > | 7045 | TGFBI | [′AACCGGGAAGGAGTCTACACAGTCTYTGCT |
| | C (p.Phe540Ser) | | | CCCACAAATGAAGCCTTCCGA′] |
| 1105 | NM_000350.2(ABCA4): c.1622T > | 24 | ABCA4 | [′CAGCTCACCCAACGTGCCCTCTCTCYACTGG |
| | C (p.Leu541Pro) | | | AGGAAAACATGTTCTGGGCC′] |
| 1106 | NM_000350.2(ABCA4): c.5819T > | 24 | ABCA4 | [′GGAAATAAAACTGACATCTTAAGGCYACAT |
| | C (p.Leu1940Pro) | | | GAACTAACCAAGGTAAGGGAA′] |
| 1107 | NM_000860.5(HPGD): c.577T > C | 3248 | HPGD | [′CTTTGTTAACACAGCCATCCTTGAAYCAATT |
| | (p.Ser193Pro) | | | GAAAAAGAAGAAAACATGGG′] |
| 1108 | NM_000223.3(KRT12): c.386T > | 3859 | KRT12 | [′CTTTCTGGATCAGAAAAAGAAACTAYGCAA |
| | C (p.Met129Thr) | | | AATCTTAATGATAGATTAGCT′] |
| 1109 | NM_000503.5(EYA1): c.1459T > | 2138 | EYA1 | [′GTTGACACTGGCCCTGAAAGCACTCYCGCTC |
| | C (p.Ser487Pro) | | | ATTCACTCCCGGTGAGGCTC′] |
| 1110 | NM_000261.1(MYOC): c.1309T > | 4653 | MYOC | [′TGCCTTCATCATCTGTGGCACCTTGYACACC |
| | C (p.Tyr437His) | | | GTCAGCAGCTACACCTCAGC′] |
| 1111 | NM_000261.1(MYOC): c.1297T > | 4653 | MYOC | [′GTCAGTCGCCAATGCCTTCATCATCYGTGGC |
| | C (p.Cys433Arg) | | | ACCTTGTACACCGTCAGCAG′] |
| 1112 | NM_130838.1(UBE3A): c.389T > | 7337 | UBE3A | [′GATTATTCCCCTTTAATCCGTGTTAYTGGAA |
| | C (p.Ile130Thr) | | | GAGTTTTTTCTAGTGCTGAG′] |
| 1113 | NM_000474.3(TWIST1): c.392T > | 7291 | TWIST1 | [′TCGCTGAACGAGGCGTTCGCCGCGCYGCGG |
| | C (p.Leu131Pro) | | | AAGATCATCCCCACGCTGCCC′] |
| 1114 | NM_000192.3(TBX5): c.161T > C | 6910 | TBX5 | [′TCCTTCTTGCAGGGCATGGAGGGAAYCAAA |
| | (p.Ile54Thr) | | | GTGTTTCTCCATGAAAGAGAA′] |
| 1115 | NM_002905.3(RDH5): c.841T > C | −1 | — | [′GACTGCTCGACACCCCCGAACCCGCBACAG |
| | (p.Tyr281His) | | | CCCAGGTTGGGATGCCAAGCT′] |
| 1116 | NM_001089.2(ABCA3): c.302T > | 21 | ABCA3 | [′GTCACTGAGACAGTGCGCAGGGCACYTGTG |
| | C (p.Leu101Pro) | | | ATCAACATGCGAGGTGAGACA′] |
| 1117 | NM_001089.2(ABCA3): c.4658T > | 21 | ABCA3 | [′ATGGACCCCGTGGCCCGGCGCCTGCYTTGG |
| | C (p.Leu1553Pro) | | | GACACCGTGGCACGAGCCCGA′] |
| 1118 | NM_001089.2(ABCA3): c.977T > | 21 | ABCA3 | [′ATCGCCGCCTCCTTCATGACCCTGCYCTTCT |
| | C (p.Leu326Pro) | | | GTGTCAAGGTGAGCATGGCG′] |
| 1119 | NM_005535.2(IL12RB1): c.592T > | 3594 | IL12RB1 | [′CTGCCTCTCCCCAGAGTCCTGCCTCYGCCCC |
| | C (p.Cys198Arg) | | | CTGGAGATGAATGTGGCCCA′] |
| 1120 | NM_005055.4(RAPSN): c.41T > C | 5913 | RAPSN | [′ACCAAGCAGCAGATCGAGAAGGGGCYCCAG |
| | (p.Leu14Pro) | | | CTGTACCAGTCCAACCAGACA′] |
| 1121 | NM_005055.4(RAPSN): c.848T > | 5913 | RAPSN | [′ATCATGACCGAGATCGGAAACCGCCYGGGG |
| | C (p.Leu283Pro) | | | CAGGTGCAGGCGCTGCTGGGT′] |
| 1122 | NM_005055.4(RAPSN): c.416T > | 5913 | RAPSN | MATGCCTTCCTGGGCCTCAGCGTCTYCCAGA |
| | C (p.Phe139Ser) | | | AGGCCCTGGAGAGCTTCGAG′] |
| 1123 | NM_005570.3(LMAN1): c.2T > C | 3998 | LMAN1 | [′CTCCTCCGCGTTCCAGAATCCAAGAYGGCG |
| | (p.Met1Thr) | | | GGATCCAGGCAAAGGGGTCTC′] |
| 1124 | NM_000430.3(PAFAH1B1): c.505T > | 5048 | PAFAH1B1 | [CAGCGGCAAGCTTCTGGCTTCCTGTYCTGCA |
| | C (p.Ser169Pro) | | | GATATGACCATTAAACTATG′] |
| 1125 | NM_000430.3(PAFAH1B1): c.92T > | 5048 | PAFAH1B1 | [′GGCTATGAAGAGGCATATTCAGTTTYTAAA |
| | C (p.Phe31Ser) | | | AAGGAAGCTGAATTAGATGTG′] |
| 1126 | NM_006261.4(PROP1): c.263T > | 5626 | PROP1 | [′CAGTTGGAACAGCTGGAGTCAGCCTYTGGG |
| | C (p.Phe88Ser) | | | AGGAACCAGTACCCCGACATC′] |
| 1127 | NM_175929.2(FGF14): c.449T > | 2259 | FGF14 | [′GAACTTTTTACCCCTGAATGCAAGTYTAAAG |
| | C (p.Phe150Ser) | | | AATCTGTTTTTGAAAATTAT′] |
| 1128 | NM_004970.2(IGFALS): c.1618T > | 3483 | IGFALS | [′GTGGCTGGAGGGTAACCCCTGGGACYGTGG |
| | C (p.Cys540Arg) | | | CTGCCCTCTCAAGGCGCTGCG′] |
| 1129 | NM_005379.3(MYO1A): c.2728T > | 4640 | MYO1A | [′CCCTTGCCTGTTCCGTCCCTAGACTYCTTCTC |
| | C (p.Ser910Pro) | | | GGATTCTCCTCCTGACCAA′] |
| 1130 | NM_006302.2(MOGS): c.1954T > | 7841 | MOGS | [′GCACTGGGCCCCAGAGCTAGGAGTCYTTGC |
| | C (p.Phe652Leu) | | | AGACTTTGGGAACCACACAAA′] |
| 1131 | NM_001009944.2(PKD1): c.2534T > | 5310 | PKD1 | [′TACGTGCCCACCAACGGCTCAGCCTYGGTGC |
| | C (p.Leu845Ser) | | | TCCAGGTGGACTCTGGTGCC′] |
| 1132 | NM_004329.2(BMPR1A): c.370T > | 657 | BMPR1A | [′AGCCCAGCTACGCCGGACAATAGAAYGTTG |
| | C (p.Cys124Arg) | | | TCGGACCAATTTATGTAACCA′] |
| 1133 | NM_004329.2(BMPR1A): c.1409T > | 657 | BMPR1A | [′CCGAGTGATCCGTCATACGAAGATAYGCGT |
| | C (p.Met470Thr) | | | GAGGTTGTGTGTGTCAAACGT′] |
| 1134 | NM_000452.2(SLC10A2): c.728T > | 6555 | SLC10A2 | [′GTGGCGGGTTACTCCCTGGGGTTTCYTCTGG |
| | C (p.Leu243Pro) | | | CTAGAATTGCTGGTCTACCC′] |
| 1135 | NM_030662.3(MAP2K2): c.400T > | 5605 | MAP2K2 | [′CAACTCGCCGTACATCGTGGGCTTCYACGGG |
| | C (p.Tyr134His) | | | GCCTTCTACAGTGACGGGGA′] |
| 1136 | NM_033337.2(CAV3): c.260T > C | 859 | CAV3 | [′CTGCTGGGCGTCCCACTGGCCCTGCHCTGGG |
| | (p.Leu87Pro) | | | GCTTCCTGTTCGCCTGCATC′] |
| 1137 | NM_000388.3(CASR): c.2417T > | 846 | CASR | [′CCGGAGAACTTCAATGAAGCCAAGTHCATC |
| | C (p.Phe806Ser) | | | ACCTTCAGCATGCTCATCTTC′] |
| 1138 | NM_000388.3(CASR): c.382T > C | 846 | CASR | [′AATTGATTCTTTGAACCTTGATGAGYTCTGC |
| | (p.Phe128Leu) | | | AACTGCTCAGAGCACATTCC′] |
| 1139 | NM_000388.3(CASR): c.1835T > | 846 | CASR | [GAGTTTCTGTCGTGGACGGAGCCCTYTGGGA |
| | C (p.Phe612Ser) | | | TCGCACTCACCCTCTTTGCC′] |
| 1140 | NM_000388.3(CASR): c.2641T > | 846 | CASR | [′GCGTTGCAGCACCGCAGCTCACGCTYTCAA |
| | C (p.Phe881Leu) | | | GGTGGCTGCCCGGGCCACGCT′] |
| 1141 | NM_000388.3(CASR): c.374T > C | 846 | CASR | [′CAAAACAAAATTGATTCTTTGAACCYTGATG |
| | (p.Leu125Pro) | | | AGTTCTGCAACTGCTCAGAG′] |
| 1142 | NM_000388.3(CASR): c.2362T > | 846 | CASR | [′CACCTGCCTGCTGGCTGCCATCTGCYTCTTC |
| | C (p.Phe788Leu) | | | TTTGCCTTCAAGTCCCGGAA′] |
| 1143 | NM_000388.3(CASR): c.38T > C | 846 | CASR | [′AGCTGCTGCTGGGTCCTCTTGGCACYCACCT |
| | (p.Leu13Pro) | | | GGCACACCTCTGCCTACGGG′] |
| 1144 | NM_030653.3(DDX11): c.2271 + | 1663 | DDX11 | [′CTGGCATATTCCAGGTGCATCCAGGYGCGG |
| | 2T > C | | | GCGTCATGCTGGGCTTGGGTC′] |
| 1145 | NM_001001557.2(GDF6): c.866T > | 392255 | GDF6 | [′TTCACCAGATCCCAGCGCAAGAACCYGTTC |
| | C (p.Leu289Pro) | | | GCAGAGATGCGCGAGCAGCTG′] |
| 1146 | NM_000557.4(GDF5): c.1322T > | −1 | — | [′TGCGAGTTCCCATTGCGCTCCCACCYGGAGC |
| | C (p.Leu441Pro) | | | CCACGAATCATGCAGTCATC′] |
| 1147 | NM_000392.4(ABCC2): c.1967 + | 1244 | ABCC2 | [′TGATTCGGAAGCCACAGTCCGAGAGYGAGT |
| | 2T > C | | | TGCCTTCTTTCCATCCTAATG′] |
| 1148 | NM_000396.3(CTSK): c.926T > C | 1513 | CTSK | [′AACTGGGGAAACAAAGGATATATCCYCATG |
| | (p.Leu309Pro) | | | GCTCGAAATAAGAACAACGCC′] |
| 1149 | NM_000304.3(PMP22): c.47T > C | 5376 | PMP22 | [′ATCATCGTCCTCCACGTCGCGGTGCYGGTGC |
| | (p.Leu16Pro) | | | TGCTGTTCGTCTCCACGATC′] |
| 1150 | NM_000304.3(PMP22): c.82T > C | 5376 | PMP22 | [′ATATCTATCTGATTCTCTCTAGCAAYGGATC |
| | (p.Trp28Arg) | | | GTGGGCAATGGACACGCAAC′] |
| 1151 | NM_001453.2(FOXC1): c.335T > | 2296 | FOXC1 | [′ATCTACCAGTTCATCATGGACCGCTHCCCCT |
| | C (p.Phe112Ser) | | | TCTACCGGGACAACAAGCAG′] |
| 1152 | NM_001451.2(FOXF1): c.1138T > | 2294 | FOXF1 | [′CCAAGACATCAAGCCTTGCGTGATGYGAGG |
| | C (p.Ter380Arg) | | | CTGCCGCCGCAGGCCCTCCTG′] |
| 1153 | NM_006432.3(NPC2): c.199T > C | 10577 | NPC2 | [′CTCTTTTTTTCTCTTAGATATTCAGYCTAAAA |
| | (p.Ser67Pro) | | | GCAGCAAGGCCGTGGTGCA′] |
| 1154 | NM_001127221.1(CACNA1A): c. | 773 | CACNA1A | [′CTGAATGTGTTCTTGGCCATCGCTGYGGACA |
| | 2141T > C (p.Val714Ala) | | | ATCTGGCCAACGCCCAGGAG′] |
| 1155 | NM_001127221.1(CACNA1A): c. | 773 | CACNA1A | [′GGGTACCGCATGGAGATGTCCATTTYCTACG |
| | 4469T > C (p.Phe1490Ser) | | | TCGTCTACTTTGTGGTGTTC′] |
| 1156 | NM_001127221.1(CACNA1A): c. | 773 | CACNA1A | [′ATGCTCTTCTTCATCTATGCCATCAYTGGGA |
| | 5126T > C (p.Ile1709Thr) | | | TGCAGGTGAGTGTCGTGTCC′] |
| 1157 | NM_000901.4(NR3C2): c.2771T > | 4306 | NR3C2 | [′CAGAGCTGGCAGAGGTTCTACCAACYGACC |
| | C (p.Leu924Pro) | | | AAGCTGCTGGACTCCATGCAT′] |
| 1158 | NM_000901.4(NR3C2): c.2936T > | 4306 | NR3C2 | [′GTGGAGTCGGGGAACGCCAAGCCGCYCTAC |
| | C (p.Leu979Pro) | | | TTCCACCGGAAGTGACTGCCC′] |
| 1159 | NM_000339.2(SLC12A3): c.2576T > | 6559 | SLC12A3 | [′CTCACCCTCCTCATTCCCTATCTCCYTGGCC |
| | C (p.Leu859Pro) | | | GCAAGAGGAGGTGGAGCAAA′] |
| 1160 | NM_000339.2(SLC12A3): c.1261T > | 6559 | SLC12A3 | [′CTGGGGTGCCTGCGAGGGGCTGGCCYGCAG |
| | C (p.Cys421Arg) | | | CTATGGCTGGAACTTCACCGA′] |
| 1161 | NM_000339.2(SLC12A3): c.1868T > | 6559 | SLC12A3 | [′TCGGTACAGGCTGGCTCCTACAACCYGGCCC |
| | C (p.Leu623Pro) | | | TCAGCTACTCGGTGGGCCTC′] |
| 1162 | NM_000163.4(GHR): c.341T > C | 2690 | GHR | [′TCTGCTGGGGAAAACAGCTGTTACTYTAATT |
| | (p.Phe114Ser) | | | CATCGTTTACCTCCATCTGG′] |
| 1163 | NM_000163.4(GHR): c.512T > C | 2690 | GHR | [′AGTTTAACTGGGATTCATGCAGATAYCCAA |
| | (p.Ile171Thr) | | | GTGAGATGGGAAGCACCACGC′] |
| 1164 | NM_000525.3(KCNJ11): c.440T > | 3767 | KCNJ11 | [′ACTGAGGAGTGCCCACTGGCCATCCYGATC |
| | C (p.Leu147Pro) | | | CTCATCGTGCAGAACATCGTG′] |
| 1165 | NM_000525.3(KCNJ11): c.124T > | 3767 | KCNJ11 | [′CCGCTTTGTGTCCAAGAAAGGCAACYGCAA |
| | C (p.Cys42Arg) | | | CGTGGCCCACAAGAACATCCG′] |
| 1166 | NM_001122764.1(PPDX): c.35T > | 5498 | PPDX | [′ACCGTGGTCGTGCTGGGCGGAGGCAYCAGC |
| | C (p.Ile12Thr) | | | GGCTTGGCCGCCAGTTACCAC′] |
| 1167 | NM_000182.4(HADHA): c.1025T > | 3030 | HADHA | [′AAAGAATCAAAGGCCTTGATGGGACYCTAC |
| | C (p.Leu342Pro) | | | CATGGTCAGGTCCTGTGCAAG′] |
| 1168 | NM_003476.4(CSRP3): c.131T > | 8048 | CSRP3 | [′CTGGCAGTGGCCTGCAGGAAGGCTCYTGAC |
| | C (p.Leu44Pro) | | | AGCACGACAGTCGCGGCTCAT′] |
| 1169 | NM_001204.6(BMPR2): c.367T > | 659 | BMPR2 | [′TTTCTGCTGTTGTAGCACAGATTTAHGTAAT |
| | C (p.Cys123Arg) | | | GTCAACTTTACTGAGAATTT′] |
| 1170 | NM_000336.2(SCNN1B): c.1858T > | 6338 | SCNN1B | [′CATCCCAGGCACCCCGCCCCCCAACYATGA |
| | C (p.Tyr620His) | | | CTCCCTGCGTCTGCAGCCGCT′] |
| 1171 | NM_002181.3(IHH): c.569T > C | 3549 | IHH | [′TCAAAGGCCCACGTGCATTGCTCCGYCAAGT |
| | (p.Val190Ala) | | | CCGGTGAGCCGCCGCCGGGG′] |
| 1172 | NM_000193.3(SHH): c.349T > C | 6469 | SHH | [′TTTGGCCATCTCGGTGATGAACCAGBGGCCA |
| | (p.Trp117Arg) | | | GGAGTGAAACTGCGGGTGAC′] |
| 1173 | NM_000193.3(SHH): c.995T > C | 6469 | SHH | [′GACCGCCGGCTCCTGCCCGCCGCTGYGCAC |
| | (p.Val332Ala) | | | AGCGTGACCCTAAGCGAGGAG′] |
| 1174 | NM_000179.2(MSH6): c.2633T > | 2956 | MSH6 | [′AAAATTATAGGGATCATGGAAGAAGBTGCT |
| | C (p.Val878Ala) | | | GATGGTTTTAAGTCTAAAATC′] |
| 1175 | NM_000098.2(CPT2): c.1342T > | 1376 | CPT2 | [′AACCCTCACTATTGACTGCGTCCAGYTTCAG |
| | C (p.Phe448Leu) | | | AGAGGAGGCAAAGAATTCCT′] |
| 1176 | NM_007315.3(STAT1): c.2117T > | 6772 | STAT1 | [′GGAACTGGATATATCAAGACTGAGTYGATT |
| | C (p.Leu706Ser) | | | TCTGTGTCTGAAGTGTAAGTG′] |
| 1177 | NM_007315.3(STAT1): c.1799T > | 6772 | STAT1 | [′AAGGACCAGCAGCCGGGGACCTTCCYGCTG |
| | C (p.Leu600Pro) | | | CGGTTCAGTGAGAGCTCCCGG′] |
| 1178 | NM_024420.2(PLA2G4A): c.331T > | 5321 | PLA2G4A | [′AGGGACAGCAACATTTACTGTATCTYCTATG |
| | C (p.Ser111Pro) | | | AAGGTGGGAGAAAAGAAAGA′] |
| 1179 | NM_000352.4(ABCC8): c.394T > | 6833 | ABCC8 | [′CTATCACAACATCGAGACTTCCAACBTCCCC |
| | C (p.Phe132Leu) | | | AAGCTGCTAATTGGTAGGTG′] |
| 1180 | NM_033163.3(FGF8): c.118T > C | 2253 | FGF8 | [′GCTGGGCAGGGAGCTCGCTTCCCTGYTCCGG |
| | (p.Phe40Leu) | | | GCTGGCCGGGAGCCCCAGGG′] |
| 1181 | NM_153767.3(KCNJ1): c.1013T > | 3758 | KCNJ1 | [′AACATCTTTCTCATTATAAAGGCACRTGGCA |
| | C (p.Met338Thr) | | | CAGTGAGGGGTCTCCACTTC′] |
| 1182 | NM_000095.2(COMP): c.982T > | 1311 | COMP | [′AACCCACCCTGTCATCCAGGACAACYGCCC |
| | C (p.Cys328Arg) | | | GCTGGTGCGGAACCCAGACCA′] |
| 1183 | NM_000095.2(COMP): c.1042T > | 1311 | COMP | [′GGACGAGGACAAGTGGGGCGATGCGYGCGA |
| | C (p.Cys348Arg) | | | CAACTGCCGGTCCCAGAAGAA′] |
| 1184 | NM_002047.2(GARS): c.548T > C | 2617 | GARS | [′ATCCTGGAGATCGATTGCACCATGCYCACCC |
| | (p.Leu183Pro) | | | CTGAGCCAGTTTTAAAGTGA′] |
| 1185 | NM_000435.2(NOTCH3): c.1363T > | 4854 | NOTCH3 | [′CCTCGACCGCATAGGCCAGTTCACCYGTATC |
| | C (p.Cys455Arg) | | | TGTATGGCAGGTGGGTGGTG′] |
| 1186 | NM_001166107.1(HMGCS2): c. | 3158 | HMGCS2 | [′CTGCTACGGTGGTACTGCCTCCCTCYTCAAT |
| | 520T > C (p.Phe174Leu) | | | GCTGCCAACTGGATGGAGTC′] |
| 1187 | NM_001038.5(SCNN1A): c.1477 | 6337 | SCNN1A | [′CCAGCTCTCTGCTGGTTACTCACGAYGGCCC |
| | C (p.Trp493Arg) | | | TCGGTGACATCCCAGGTAGA′] |
| 1188 | NM_000161.2(GCH1): c.662T > C | 2643 | GCH1 | [′ATGGTAATGCGAGGTGTACAGAAAAYGAAC |
| | (p.Met221Thr) | | | AGCAAAACTGTGACCAGCACA′] |
| 1189 | NM_000059.3(BRCA2): c.7529T > | 675 | BRCA2 | [′CGCGTCTTTCCACAGCCAGGCAGTCYGTATC |
| | C (p.Leu2510Pro) | | | TTGCAAAAACATCCACTCTG′] |
| 1190 | NM_000180.3(GUCY2D): c.1694T > | 3000 | GUCY2D | [′GGAGACAGGGTTTGGCTGAAGAAATYCCCA |
| | C (p.Phe565Ser) | | | GGGGATCAGCACATAGCTATC′] |
| 1191 | NM_000180.3(GUCY2D): c.2846T > | 3000 | GUCY2D | [′AATGGGCAGCGACACGCGGCAGAGAYCGCC |
| | C (p.Ile949Thr) | | | AACATGTCACTGGACATCCTC′] |
| 1192 | NM_198056.2(SCN5A): c.3963 + | 6331 | SCN5A | [′CTGTCACGATTTGAGGGCATGAGGGYAAGA |
| | 2T > C | | | GAGGTGGCTGCCTTCCCACCA′] |
| 1193 | NM_000335.4(SCN5A): c.5380T > | 6331 | SCN5A | [′GAGTGAGGACGACTTCGATATGTTCYATGA |
| | C (p.Tyr1794His) | | | GATCTGGGAGAAATTTGACCC′] |
| 1194 | NM_000023.2(SGCA): c.524T > C | 6442 | SGCA | [′CCCGGAGAGCTTCAGCTGCTCAACGYCACCT |
| | (p.Val175Ala) | | | CTGCCTTGGACCGTGGGGGC′] |
| 1195 | NM_002427.3(MMP13): c.224T > | 4322 | MMP13 | [′AGGCTCCGAGAAATGCAGTCTTTCTYCGGCT |
| | C (p.Phe75Ser) | | | TAGAGGTGACTGGCAAACTT′] |
| 1196 | NM_002427.3(MMP13): c.221T > | 4322 | MMP13 | [′GAGAGGCTCCGAGAAATGCAGTCTTYCTTC |
| | C (p.Phe74Ser) | | | GGCTTAGAGGTGACTGGCAAA′] |
| 1197 | NM_002427.3(MMP13): c.272T > | 4322 | MMP13 | [′CTTGACGATAACACCTTAGATGTCAYGAAA |
| | C (p.Met91Thr) | | | AAGCCAAGATGCGGGGTTCCT′] |
| 1198 | NM_004525.2(LRP2): c.7564T > | 4036 | LRP2 | [′CTCCTTTTGTATGACTAGGTACCTGYACTGG |
| | C (p.Tyr2522His) | | | GCTGACTGGGATACACATGC′] |
| 1199 | NM_000211.4(ITGB2): c.446T > | 3689 | ITGB2 | [′GATGACCTCAGGAATGTCAAGAAGCYAGGT |
| | C (p.Leu149Pro) | | | GGCGACCTGCTCCGGGCCCTC′] |
| 1200 | NM_000211.4(ITGB2): c.412T > | 3689 | ITGB2 | [′GTACTATCTGATGGACCTCTCCTACYCCATG |
| | C (p.Ser138Pro) | | | CTTGATGACCTCAGGAATGT′] |
| 1201 | NM_005502.3(ABCA1): c.4429T > | 19 | ABCA1 | [′CAAAATCAAGAAGATGCTGCCTGTGYGTCC |
| | C (p.Cys1477Arg) | | | CCCAGGGGCAGGGGGGCTGCC′] |
| 1202 | NM_005502.3(ABCA1): c.6026T > | 19 | ABCA1 | [′TTGACTGGGAGAGAACACGTGGAGTYCTTT |
| | C (p.Phe2009Ser) | | | GCCCTTTTGAGAGGAGTCCCA′] |
| 1203 | NM_130439.3(MXI1): c.552 + | 4601 | MXI1 | [′AACAAAGCCAAAGCACACATCAAGGYGAGA |
| | 2T > C | | | ATTTTTACTTTCAGATTTGCA′] |
| 1204 | m.5874T > C | 4579 | MT-TY | [′GTCTTTAGATTTACAGTCCAATGCTYCACTC |
| | | | | AGCCATTTTACCTCACCCCC′] |
| 1205 | m.7512T > C | 4574 | MT-TS1 | [′CCAACCCCATGGCCTCCATGACTTTYTCAAA |
| | | | | AAGGTATTAGAAAAACCATT′] |
| 1206 | m.7510T > C | 4574 | MT-TS1 | [′AGCCAACCCCATGGCCTCCATGACTYTTTCA |
| | | | | AAAAGGTATTAGAAAAACCA′] |
| 1207 | m.7511T > C | 4574 | MT-TS1 | [′GCCAACCCCATGGCCTCCATGACTTYTTCAA |
| | | | | AAAGGTATTAGAAAAACCAT′] |
| 1208 | m.616T > C | 4558 | MT-TF | [′CCTCCTCAAAGCAATACACTGAAAABGTTTA |
| | | | | GACGGGCTCACATCACCCCA′] |
| 1209 | m.4409T > C | 4569 | MT-TM | [′TATCACACCCCATCCTAAAGTAAGGYCAGCT |
| | | | | AAATAAGCTATCGGGCCCAT′] |
| 1210 | m.8356T > C | 4566 | MT-TK | [′AAAGATTAAGAGAACCAACACCTCTYTACA |
| | | | | GTGAAATGCCCCAACTAAATA′] |
| 1211 | m.12297T > C | 4568 | MT-TL2 | [′AAAGGATAACAGCTATCCATTGGTCYTAGG |
| | | | | CCCCAAAAATTTTGGTGCAAC′] |
| 1212 | m.3271T > C | 4567 | MT-TL1 | [′CCGGTAATCGCATAAAACTTAAAACYTTAC |
| | | | | AGTCAGAGGTTCAATTCCTCT′] |
| 1213 | m.3250T > C | 4567 | MT-TL1 | [′GGTTTGTTAAGATGGCAGAGCCCGGYAATC |
| | | | | GCATAAAACTTAAAACTTTAC′] |
| 1214 | m.3290T > C | 4567 | MT-TL1 | [′TAAAACTTTACAGTCAGAGGTTCAAYTCCTC |
| | | | | TTCTTAACAACATACCCATG′] |
| 1215 | m.4290T > C | 4565 | MT-TI | [′AAATATGTCTGATAAAAGAGTTACTYTGATA |
| | | | | GAGTAAATAATAGGAGCTTA′] |
| 1216 | m.4291T > C | 4565 | MT-TI | [′AATATGTCTGATAAAAGAGTTACTTYGATAG |
| | | | | AGTAAATAATAGGAGCTTAA′] |
| 1217 | m.9997T > C | 4563 | MT-TG | [′ATCTATTGATGAGGGTCTTACTCTTYTAGTA |
| | | | | TAAATAGTACCGTTAACTTC′] |
| 1218 | m.10010T > C | 4563 | MT-TG | [′GGTCTTACTCTTTTAGTATAAATAGYACCGT |
| | | | | TAACTTCCAATTAACTAGTT′] |
| 1219 | m.4336T > C | 4572 | MT-TQ | [′GCTTAAACCCCCTTATTTCTAGGACYATGAG |
| | | | | AATCGAACCCATCCCTGAGA′] |
| 1220 | m.14709T > C | 4556 | MT-TE | [′CGGACTACAACCACGACCAATGATAYGAAA |
| | | | | AACCATCGTTGTATTTCAACT′] |
| 1221 | m.14674T > C | 4556 | MT-TE | [′TCAACAGAAACAAAGCATACATCATBATTCT |
| | | | | CGCACGGACTACAACCACGA′] |
| 1222 | m.5692T > C | 4570 | MT-TN | [′GGGACTTAAACCCACAAACACTTAGYTAAC |
| | | | | AGCTAAGCACCCTAATCAACT′] |
| 1223 | m.5728T > C | 4570 | MT-TN | [′GCACCCTAATCAACTGGCTTCAATCYACTTC |
| | | | | TCCCGCCGCCGGGAAAAAAG′] |
| 1224 | m.2991T > C | 4550 | MT-RNR2 | [′TCAACAATAGGGTTTACGACCTCGAYGTTGG |
| | | | | ATCAGGACATCCCGATGGTG′] |
| 1225 | m.1291T > C | 4549 | MT-RNR1 | [′ATCTTCAGCAAACCCTGATGAAGGCYACAA |
| | | | | AGTAAGCGCAAGTACCCACGT′] |
| 1226 | m.1095T > C | 4549 | MT-RNR1 | [′CTGGGATTAGATACCCCACTATGCTYAGCCC |
| | | | | TAAACCTCAACAGTTAAATC′] |
| 1227 | m.8528T > C | −1 | — | [′TTATAACAAACCCTGAGAACCAAAAYGAAC |
| | | | | GAAAATCTGTTCGCTTCATTC′] |
| 1228 | m.8993T > C | 4508 | MT-ATP6 | [′AGCCTACTCATTCAACCAATAGCCCBGGCCG |
| | | | | TACGCCTAACCGCTAACATT′] |
| 1229 | m.9101T > C | 4508 | MT-ATP6 | [′ATTAACCTTCCCTCTACACTTATCAYCTTCA |
| | | | | CAATTCTAATTCTACTGACT′] |
| 1230 | m.9176T > C | 4508 | MT-ATP6 | [′ATCCAAGCCTACGTTTTCACACTTCBAGTAA |
| | | | | GCCTCTACCTGCACGACAAC′] |
| 1231 | m.8851T > C | 4508 | MT-ATP6 | [′AAACCTAGCCATGGCCATCCCCTTAYGAGC |
| | | | | GGGCACAGTGATTATAGGCTT′] |
| 1232 | m.9185T > C | 4508 | MT-ATP6 | [′TACGTTTTCACACTTCTAGTAAGCCYCTACC |
| | | | | TGCACGACAACACATAATGA′] |
| 1233 | m.7587T > C | 4513 | MT-CO2 | [′ATAGGCTAAATCCTATATATCTTAAYGGCAC |
| | | | | ATGCAGCGCAAGTAGGTCTA′] |
| 1234 | m.6742T > C | 4512 | MT-CO1 | [′GGTATGGTCTGAGCTATGATATCAAYTGGCT |
| | | | | TCCTAGGGTTTATCGTGTGA′] |
| 1235 | m.6721T > C | 4512 | MT-CO1 | [′AAAGAACCATTTGGATACATAGGTAYGGTC |
| | | | | TGAGCTATGATATCAATTGGC′] |
| 1236 | m.7275T > C | 4512 | MT-CO1 | [′CATGAAACATCCTATCATCTGTAGGYTCATT |
| | | | | CATTTCTCTAACAGCAGTAA′] |
| 1237 | m.15572T > C | 4519 | MT-CYB | [′CATCAAGCCCGAATGATATTTCCTAYTCGCC |
| | | | | TACACAATTCTCCGATCCGT′] |
| 1238 | m.15197T > C | 4519 | MT-CYB | [′GGCCACAGTAATTACAAACTTACTAYCCGCC |
| | | | | ATCCCATACATTGGGACAGA′] |
| 1239 | m.14849T > C | 4519 | MT-CYB | [′CATCTCCGCATGATGAAACTTCGGCYCACTC |
| | | | | CTTGGCGCCTGCCTGATCCT′] |
| 1240 | NC_012920.1: m.14484T > C | 4541 | MT-ND6 | [′GCTGTAGTATATCCAAAGACAACCAYCATTC |
| | | | | CCCCTAAATAAATTAAAAAA′] |
| 1241 | m.14487T > C | 4541 | MT-ND6 | [′GTAGTATATCCAAAGACAACCATCAYTCCCC |
| | | | | CTAAATAAATTAAAAAAACT′] |
| 1242 | m.12706T > C | 4540 | MT-NDS | [′ATCAGTTCTTCAAATATCTACTCATYTTCCT |
| | | | | AATTACCATACTAATCTTAG′] |
| 1243 | m.10563T > C | 4539 | MT-ND4L | [′CTCACACCTCATATCCTCCCTACTAYGCCTA |
| | | | | GAAGGAATAATACTATCGCT′] |
| 1244 | m.10663T > C | 4539 | MT-ND4L | [′ATATTGTGCCTATTGCCATACTAGTYTTTGC |
| | | | | CGCCTGCGAAGCAGCGGTNG′] |
| 1245 | m.10191T > C | 4537 | MT-ND3 | [′TTACGAGTGCGGCTTCGACCCTATAYCCCCC |
| | | | | GCCCGCGTCCCTTTCTCCAT′] |
| 1246 | m.10158T > C | 4537 | MT-ND3 | [′ACAACTCAACGGCTACATAGAAAAAYCCAC |
| | | | | CCCTTACGAGTGCGGCTTCGA′] |
| 1247 | m.4681T > C | 4536 | MT-ND2 | [′CAAGCAACCGCATCCATAATCCTTCYAATAG |
| | | | | CTATCCTCTTCAACAATATA′] |
| 1248 | m.4160T > C | 4535 | MT-ND1 | [′TACCCCCGATTCCGCTACGACCAACYCATAC |
| | | | | ACCTCCTATGAAAAAACTTC′] |
| 1249 | m.3394T > C | 4535 | MT-ND1 | [′GCTTACCGAACGAAAAATTCTAGGCYATAT |
| | | | | ACAACTACGCAAAGGCCCCAA′] |
| 1250 | m.3308T > C | 4535 | MT-ND1 | [′GGTTCAATTCCTCTTCTTAACAACABACCCA |
| | | | | TGGCCAACCTCCTACTCCTC′] |
| 1251 | m.3949T > C | 4535 | MT-ND1 | [′ACTAGTCTCAGGCTTCAACATCGAAYACGCC |
| | | | | GCAGGCCCCTTCGCCCTATT′] |
| 1252 | NM_003140.2(SRY): c.326T > C | 6736 | SRY | [′CTTACTGAAGCCGAAAAATGGCCATYCTTCC |
| | (p.Phe109Ser) | | | AGGAGGCACAGAAATTACAG′] |
| 1253 | NM_003140.2(SRY): c.203T > C | 6736 | SRY | [′GTGAAGCGACCCATGAACGCATTCAYCGTG |
| | (p.IIe68Thr) | | | TGGTCTCGCGATCAGAGGCGC′] |
| 1254 | NM_021083.2(XK): c.880T > C | 7504 | XK | [′ACTCTATACTGGTATCAACATGTTCNGCTGG |
| | (p.Cys294Arg) | | | TCTGCTGTACAGCTGAAAAT′] |
| 1255 | NM_000354.5(SERPINA7): c. | 6906 | SERPINA7 | [′CACCAGATGGAACAATACTATCACCYAGTG |
| | 740T > C (p.Leu247Pro) | | | GATATGGAATTGAACTGCACA′] |
| 1256 | NM_000044.3(AR): c.2033T > C | 367 | AR | [′TGTCAGCCCATCTTTCTGAATGTCCYGGAAG |
| | (p.Leu678Pro) | | | CCATTGAGCCAGGTGTAGTG′] |
| 1257 | NM_000044.3(AR): c.2423T > C | 367 | AR | [′ATCACCCCCCAGGAATTCCTGTGCAYGAAA |
| | (p.Met808Thr) | | | GCACTGCTACTCTTCAGCATT′] |
| 1258 | NM_000044.3(AR): c.2596T > C | 367 | AR | [′CTACCAGCTCACCAAGCTCCTGGACYCCGTG |
| | (p.Ser866Pro) | | | CAGCCTGTAAGCAAACGATG′] |
| 1259 | NM_000451.3(SHOX): c.877T > C | 6473 | SHOX | [′GAAGCACGCGGAGGCCCTGGGGCTCYGACC |
| | (p.Ter293Arg) | | | CGCCGCGCAGCCCCCCGCGCG′] |
| 1260 | NM_000330.3(RS1): c.286T > C | −1 | — | [′TTGAGCCGGGCCTTGTTTGCAGTCCRCGAAG |
| | (p.Trp96Arg) | | | AATACCAGCCCACATACTGC′] |
| 1261 | NM_000330.3(RS1): c.38T > C | 6247 | RS1 | [′ATAGAAGGCTTTTTGTTATTACTTCYCTTTG |
| | (p.Leu13Pro) | | | GCTATGAAGGTATGTGCTAT′] |
| 1262 | NM_000330.3(RS1): c.667T > C | −1 | — | [′CCGAGCTGAGGCAGGCATCAGGCACRCTTG |
| | (p.Cys223Arg) | | | CTGACGCACTCCAGCAGCTCC′] |
| 1263 | NM_002764.3(PRPS1): c.344T > | 5631 | PRPS1 | [′ATCTCAGCCAAGCTTGTTGCAAATAYGCTAT |
| | C (p.Met115Thr) | | | CTGTAGCAGGTGCAGATCAT′] |
| 1264 | NM_002764.3(PRPS1): c.455T > | 5631 | PRPS1 | [′AATTTGTATGCAGAGCCGGCTGTCCYAAAGT |
| | C (p.Leu152Pro) | | | GGATAAGGGAGAATATCTCT′] |
| 1265 | NM_002764.3(PRPS1): c.869T > | 5631 | PRPS1 | [′TTTCCTTTCTTGCCTTTCTAGGTGAYTGACAT |
| | C (p.Ile290Thr) | | | CTCTATGATCCTTGCAGAA′] |
| 1266 | NM_000291.3(PGK1): c.263T > C | 5230 | PGK1 | [′CCAGTTGCTGTAGAACTCAAATCTCYGCTGG |
| | (p.Leu88Pro) | | | GCAAGTAAGTGCCAGGCTCT′] |
| 1267 | NM_000291.3(PGK1): c.946T > C | 5230 | PGK1 | [′CACCTCTACCCCTCAGGGCTTGGACYGTGGT |
| | (p.Cys316Arg) | | | CCTGAAAGCAGCAAGAAGTA′] |
| 1268 | NM_000291.3(PGK1): c.758T > C | 5230 | PGK1 | [′CATCATTTTGGCTCCCCTGTGTAGAYTGGCA |
| | (p.Ile253Thr) | | | CTTCTCTGTTTGATGAAGAG′] |
| 1269 | NM_001122606.1(LAMP2): c.961T > | 3920 | LAMP2 | [′CATTGCAAATAACAATCTCAGCTACYGGGA |
| | C (p.Trp321Arg) | | | TGCCCCCCTGGGAAGTTCTTA′] |
| 1270 | NM_000206.2(IL2RG): c.343T > | 3561 | IL2RG | [′ATTCTCTGAAGAAATCACTTCTGGCYGTCAG |
| | C (p.Cys115Arg) | | | TTGCAAAAAAAGGAGATCCA′] |
| 1271 | NM_000206.2(IL2RG): c.452T > | 3561 | IL2RG | [′ACACAGATGCTAAAACTGCAGAATCYGGGT |
| | C (p.Leu151Pro) | | | AATTTGGAAAGAAAGGGTCAA′] |
| 1272 | NM_000194.2(HPRT1): c.122T > | 3251 | HPRT1 | [′GAAAGGGTGTTTATTCCTCATGGACYAATTA |
| | C (p.Leu41Pro) | | | TGGACAGGTAAGTAAGATCT′] |
| 1273 | NM_000194.2(HPRT1): c.170T > | 3251 | HPRT1 | [′CTTGCTCGAGATGTGATGAAGGAGAYGGGA |
| | C (p.Met57Thr) | | | GGCCATCACATTGTAGCCCTC′] |
| 1274 | NM_000132.3(F8): c.6554T > C | 2157 | F8 | [′ATTCGCAGCACTCTTCGCATGGAGTYGATGG |
| | (p.Leu2185Ser) | | | GCTGTGATTTAAATAGTAAG′] |
| 1275 | NM_000132.3(F8): c.985T > C | 2157 | F8 | [′GGACCTTGGACAGTTTCTACTGTTTYGTCAT |
| | (p.Cys329Arg) | | | ATCTCTTCCCACCAACATGG′] |
| 1276 | NM_000132.3(F8): c.5372T > C | 2157 | F8 | [′AGAGCAGAAGTTGAAGATAATATCAYGGTG |
| | (p.Met1791Thr) | | | AGTTAAGGACAGTGGAATTAC′] |
| 1277 | NM_000132.3(F8): c.1754T > C | 2157 | F8 | [′CCTTTCAATATATGTAATTAACAGAYAATGT |
| | (p.Ile585Thr) | | | CAGACAAGAGGAATGTCATC′] |
| 1278 | NM_000132.3(F8): c.935T > C | 2157 | F8 | [′TCCTTGGAAATCTCGCCAATAACTTYCCTTA |
| | (p.Phe312Ser) | | | CTGCTCAAACACTCTTGATG′] |
| 1279 | NM_000132.3(F8): c.980T > C | 2157 | F8 | [′TTGATGGACCTTGGACAGTTTCTACYGTTTT |
| | (p.Leu327Pro) | | | GTCATATCTCTTCCCACCAA′] |
| 1280 | NM_000132.3(F8): c.1174T > C | 2157 | F8 | [′CTCTCCTTCCTTTATCCAAATTCGCYCAGTTG |
| | (p.Ser392Pro) | | | CCAAGAAGCATCCTAAAAC′] |
| 1281 | NM_000132.3(F8): c.1417T > C | 2157 | F8 | [′ATCAGGAATCTTGGGACCTTTACTTYATGGG |
| | (p.Tyr473His) | | | GAAGTTGGAGACACACTGTT′] |
| 1282 | NM_000132.3(F8): c.1481T > C | 2157 | F8 | [′AATCAAGCAAGCAGACCATATAACAYCTAC |
| | (p.Ile494Thr) | | | CCTCACGGAATCACTGATGTC′] |
| 1283 | NM_000132.3(F8): c.1729T > C | 2157 | F8 | [′CCCTCTCCTCATCTGCTACAAAGAAYCTGTA |
| | (p.Ser577Pro) | | | GATCAAAGAGGAAACCAGGT′] |
| 1284 | NM_000132.3(F8): c.1958T > C | 2157 | F8 | [′CAGTTGTCAGTTTGTTTGCATGAGGYGGCAT |
| | (p.Val653Ala) | | | ACTGGTACATTCTAAGCATT′] |
| 1285 | NM_000132.3(F8): c.2029T > C | 2157 | F8 | [′TTCTGTCTTCTTCTCTGGATATACCYTCAAAC |
| | | | | ACAAAATGGTCTATGAAGA′] |
| 1286 | NM_000132.3 (F8): c.6193T > C | 2157 | F8 | [′GTTTCTTTACTTGGGCAAAGGACAGYGGGCC |
| | | | | CCAAAGCTGGCCAGACTTCA′] |
| 1287 | NM_007325.4(GRIA3): c.2117T > | 2892 | GRIA3 | [′GTGTACGAGAAAATGTGGTCTTACAYGAAA |
| | C (p.Met706Thr) | | | TCAGCGGAGCCATCTGTGTTT′] |
| 1288 | NM_000402.4(G6PD): c.1058T > | 2539 | G6PD | [′GAGGGCGAGGCCACCAAAGGGTACCYGGAC |
| | C (p.Leu353Pro) | | | GACCCCACGGTGCCCCGCGGG′] |
| 1289 | NM_000402.4(G6PD): c.1054T > | 2539 | G6PD | [′TGGAGAGGGCGAGGCCACCAAAGGGYACCT |
| | C (p.Tyr352His) | | | GGACGACCCCACGGTGCCCCG′] |
| 1290 | NM_001097642.2(GJB1): c.397T > | 2705 | GJB1 | [′GGTCCACATCTCAGGGACACTGTGGYGGAC |
| | C (p.Trp133Arg) | | | CTATGTCATCAGCGTGGTGTT′] |
| 1291 | NM_000166.5(GJB1): c.407T > C | 2705 | GJB1 | [′TCAGGGACACTGTGGTGGACCTATGYCATC |
| | (p.Val136Ala) | | | AGCGTGGTGTTCCGGCTGTTG′] |
| 1292 | NM_000032.4(ALAS2): c.595T > | 212 | ALAS2 | [′TGTGTCCGTCTGGTGTAGTAATGATYACCTG |
| | C (p.Tyr199His) | | | GGCATGAGCCGACACCCTCA′] |
| 1293 | NM_020061.5(OPN1MW): c.607T > | 5956 | OPN1LW | [′CTGGCCCCACGGCCTGAAGACTTCAYGCGG |
| | C (p.Cys203Arg) | | | CCCAGACGTGTTCAGCGGCAG′] |
| 1294 | NM_000513.2(OPN1MW): c.607T > | 2652 | OPN1MW | [′CTGGCCCCACGGCCTGAAGACTTCAYGCGG |
| | C (p.Cys203Arg) | | | CCCAGACGTGTTCAGCGGCAG′] |
| 1295 | NM_000513.2(OPN1MW): c.529T > | 2652 | OPN1MW | [′GGCCATCGTGGGCATTGCCTTCTCCYGGATC |
| | C (p.Trp177Arg) | | | TGGGCTGCTGTGTGGACAGC′] |
| 1296 | NM_000273.2(GPR143): c.397T > | 4935 | GPR143 | [′GCTGTTGTACAGTGCCTGCTTCTGGHGGCTG |
| | C (p.Trp133Arg) | | | TTTTGCTATGCAGTGGATGC′] |
| 1297 | NM_000133.3(F9): c.52T > C | 2158 | F9 | [′AGAATCACCAGGCCTCATCACCATCYGCCTT |
| | (p.Cys18Arg) | | | TTAGGATATCTACTCAGTGC′] |
| 1298 | NM_000133.3(F9): c.1058T > C | 2158 | F9 | [′TTCCTCAAATTTGGATCTGGCTATGYAAGTG |
| | (p.Val353Ala) | | | GCTGGGGAAGAGTCTTCCAC′] |
| 1299 | NM_000133.3(F9): c.1144T > C | 2158 | F9 | [′AGTTCCACTTGTTGACCGAGCCACAHGTCTT |
| | (p.Cys382Arg) | | | CGATCTACAAAGTTCACCAT′] |
| 1300 | NM_000133.3(F9): c.1328T > C | 2158 | F9 | [′TGTGCAATGAAAGGCAAATATGGAAYATAT |
| | (p.Ile443Thr) | | | ACCAAGGTATCCCGGTATGTC′] |
| 1301 | NM_000133.3(F9): c.1357T > C | 2158 | F9 | [′TACCAAGGTATCCCGGTATGTCAACYGGATT |
| | (p.Trp453Arg) | | | AAGGAAAAAACAAAGCTCAC′] |
| 1302 | NM_000133.3(F9): c.82T > C | 2158 | F9 | [′TTTAGGATATCTACTCAGTGCTGAAYGTACA |
| | (p.Cys28Arg) | | | GGTTTGTTTCCTTTTTTAAA′] |
| 1303 | NM_000133.3(F9): c.277 + 2T > C | 2158 | F9 | [′CTGAATTTTGGAAGCAGTATGTTGGYAAGC |
| | | | | AATTCATTTTATCCTCTAGCT′] |
| 1304 | NM_000133.3(F9): c.1031T > C | 2158 | F9 | [′ATTGCTGACAAGGAATACACGAACAYCTTC |
| | (p.Ile344Thr) | | | CTCAAATTTGGATCTGGCTAT′] |
| 1305 | NM_000169.2(GLA): c.484T > C | −1 | — | [′CATTGATGCCCAGACCTTTGCTGACYGGGGA |
| | (p.Trp162Arg) | | | GTAGATCTGCTAAAATTTGA′] |
| 1306 | NM_000169.2(GLA): c.806T > C | −1 | — | [′TTATTTCATTCTTTTTCTCAGTTAGYGATTGG |
| | (p.Val269Ala) | | | CAACTTTGGCCTCAGCTGG′] |
| 1307 | NM_015107.2(PHF8): c.836T > C | 23133 | PHF8 | [′CCAACAAATGCCAATCTGACTCTCTYTGAGT |
| | (p.Phe279Ser) | | | GCTGGAGCAGTTCCTCTAAT′] |
| 1308 | NM_033290.3 (MID1): c.1877T > | 4281 | MID1 | [′TATGATGCTTTGAACTCCATCCACCYCTACA |
| | C (p.Leu626Pro) | | | CCTTCGACGTCGCATTTGCG′] |
| 1309 | NM_033290.3 (MID1): c.884T > C | 4281 | MID1 | [′TTCAAGGTGATGAGGCTTCGCAAACYGGCT |
| | (p.Leu295Pro) | | | CAGCAGATTGCAAACTGCAAA′] |
| 1310 | NM_000444.5(PHEX): c.755T > C | 5251 | PHEX | [′CAGTATCGGGATGCCCTTTACAAGTYCATGG |
| | (p.Phe252Ser) | | | TGGATACTGCCGTGCTTTTA′] |
| 1311 | NM_000444.5(PHEX): c.1664T > | 5251 | PHEX | [′CTCATAGGATTTCCAGCAGGAGAGCYCCAG |
| | C (p.Leu555Pro) | | | AAGCCTTTCTTTTGGGGAACA′] |
| 1312 | NM_001205019.1(GK): c.1525T > | 2710 | GK | [′AGAAAGTGAAATTCGTTATTCTACAYGGAA |
| | C (p.Trp509Arg) | | | GAAAGCTGTGATGAAGTCAAT′] |
| 1313 | NM_000475.4(NR0B1): c.890T > | 190 | NR0B1 | [′AACTGCTGGGCGTCCCTGCTCATGCYTGAGC |
| | C (p.Leu297Pro) | | | TGGCCCAGGACCGCTTGCAG′] |
| 1314 | NM_000531.5(OTC): c.332T > C | 5009 | OTC | [′CTTCTGGGAGGACATCCTTGTTTTCYTACCA |
| | (p.Leu111Pro) | | | CACAAGATATTCATTTGGGT′] |
| 1315 | NM_000531.5(OTC): c.134T > C | 5009 | OTC | [′CTGAAGGGCCGTGACCTTCTCACTCYAAAA |
| | (p.Leu45Pro) | | | AACTTTACCGGAGAAGAAATT′] |
| 1316 | NM_000531.5(OTC): c.717+2T > | 5009 | OTC | [′TTGGCAGAGCAGTATGCCAAAGAGGYATGC |
| | C | | | TCTTTACATGTAAAGCTATTA′] |
| 1317 | NM_001399.4(EDA): c.181T > C | 1896 | EDA | [′CCTCCACCTGCTGACGTTGTGCTGCYACCTA |
| | (p.Tyr61His) | | | GAGTTGCGCTCGGAGTTGCG′] |
| 1318 | NM_001015877.1(PHF6): c.2T > | 84295 | PHF6 | [′CATTCTAAAGGCAATTTAAAAATCAYGTCA |
| | C (p.Met1Thr) | | | AGCTCAGTTGAACAGAAAAAA′] |
| 1319 | NM_001128834.2(PLP1): c.487T > | 5354 | PLP1 | [′CATCACCTATGCCCTGACCGTTGTGYGGCTC |
| | C (p.Trp163Arg) | | | CTGGTGTTTGCCTGCTCTGC′] |
| 1320 | NM_001128834.2(PLP1): c.671T > | 5354 | PLP1 | [′CCTGGCAAGGTTTGTGGCTCCAACCYTCTGT |
| | C (p.Leu224Pro) | | | CCATCTGCAAAACAGCTGAG′] |
| 1321 | NM_001128834.2(PLP1): c.560T > | 5354 | PLP1 | [′AACACCTGGACCACCTGCCAGTCTAYTGCCT |
| | C (p.Ile187Thr) | | | TCCCCAGCAAGACCTCTGCC′] |
| 1322 | NM_001128834.2(PLP1): c.710T > | 5354 | PLP1 | [ATTTTCCTGCAGTTCCAAATGACCTYCCACC |
| | C (p.Phe237Ser) | | | TGTTTATTGCTGCATTTGTG′] |
| 1323 | NM_000116.4(TAZ): c.352T > C | 6901 | TAZ | [′CTCCCACTTCTTCAGCTTGGGCAAGYGTGTG |
| | (p.Cys118Arg) | | | CCTGTGTGCCGAGGTGAGCT′] |
| 1324 | NM_000377.2(WAS): c.244T > C | 7454 | WAS | [′CTTCGTGAAGGATAACCCCCAGAAGYCCTA |
| | (p.Ser82Pro) | | | CTTCATCCGCCTTTACGGCCT′] |
| 1325 | NM_000377.2(WAS): c.809T > C | 7454 | WAS | [′AACCTCGACCCAGATCTGCGGAGTCYGTTCT |
| | (p.Leu270Pro) | | | CCAGGGCAGGAATCAGCGAG′] |
| 1326 | NM_182680.1(AMELX): c.2T > C | −1 | — | [′CTTACATTTCAGAACCATCAAGAAAYGGGG |
| | (p.Met1Thr) | | | ACCTGGATTTTATTTGCCTGC′] |
| 1327 | NM_000074.2(CD40LG): c.464T > | 959 | CD40LG | [′ACCATGAGCAACAACTTGGTAACCCYGGAA |
| | C (p.Leu155Pro) | | | AATGGGAAACAGCTGACCGTT′] |
| 1328 | NM_139058.2(ARX): c.98T > C | 170302 | ARX | [′TCCTCCTACTGCATCGACAGCATCCYGGGCC |
| | (p.Leu33Pro) | | | GGAGGAGCCCGTGCAAAATG′] |
| 1329 | NM_001109878.1(TBX22): c.641T > | 50945 | TBX22 | [′TGATCATTTCTCCTCCAGATCATTCYGCAAT |
| | C (p.Leu214Pro) | | | CCATGCATAAGTACAAACCC′] |
| 1330 | NM_000061.2(BTK): c.2T > C | 695 | BTK | [′GGTGAACTCCAGAAAGAAGAAGCTAYGGCC |
| | (p.Met1Thr) | | | GCAGTGATTCTGGAGAGCATC′] |
| 1331 | NM_000061.2(BTK): c.1223T > C | 695 | BTK | [′AAGGACCTGACCTTCTTGAAGGAGCYGGGG |
| | (p.Leu408Pro) | | | ACTGGACAATTTGGGGTAGTG′] |
| 1332 | NM_000061.2(BTK): c.1516T > C | 695 | BTK | [′GCTGCTAGAGATGTGCAAGGATGTCYGTGA |
| | (p.Cys506Arg) | | | AGCCATGGAATACCTGGAGTC′] |
| 1333 | NM_000061.2(BTK): c.1625T > C | 695 | BTK | [′GTTGTTAAAGTATCTGATTTCGGCCYGTCCA |
| | (p.Leu542Pro) | | | GGTGAGTGTGGCTTTTTCAT′] |
| 1334 | NM_000061.2(BTK): c.1741T > C | 695 | BTK | [′CAAGTTCAGCAGCAAATCTGACATTYGGGC |
| | (p.Trp581Arg) | | | TTTTGGTAAGTGGATAAGATT′] |
| 1335 | NM_000061.2(BTK): c.1955T > C | 695 | BTK | [′TTCAAAATTCTTCTGAGCAATATTCYAGATG |
| | (p.Leu652Pro) | | | TCATGGATGAAGAATCCTGA′] |
| 1336 | NM_015884.3(MBTPS2): c.1424T > | 51360 | MBTPS2 | [′GATGGACAATGGATTCTAAACTCTTYCTTGG |
| | C (p.Phe475Ser) | | | ATGCCACCCTTACCTCAGTG′] |
| 1337 | NM_014009.3(FOXP3): c.970T > | 50943 | FOXP3 | [′GATTCATCCCCACCCTCTGACAGAGYTCCTC |
| | C (p.Phe324Leu) | | | CACAACATGGACTACTTCAA′] |
| 1338 | NM_014009.3(FOXP3): c.1099T > | 50943 | FOXP3 | [′GACACTCAATGAGATCTACCACTGGYTCAC |
| | C (p.Phe367Leu) | | | ACGCATGTTTGCCTTCTTCAG′] |
| 1339 | NM_022567.2(NYX): c.302T > C | 60506 | NYX | [′CTGCGCCACAACAACCTGTCCTTCAYCACGC |
| | (p.Ile101Thr) | | | CCGGCGCCTTCAAGGGCCTG′] |
| 1340 | NM_003639.4(IKBKG): c.1249T > | 8517 | EKBKG | [′CACCCTGCAGATACATGTCATGGAGYGCATT |
| | C (p.Cys417Arg) | | | GAGTAGGGCCGGCCAGTGCA′] |
| 1341 | NM_006579.2(EBP): c.53T > C | 10682 | EBP | [′CCATACTGGCCTCAGCACCTAAGACYGGAC |
| | (p.Leu18Pro) | | | AACTTTGTACCTAATGACCGC′] |
| 1342 | NM_003159.2(CDKL5): c.215T > | 6792 | CDKL5 | [′CTTCGGACTCTCAAGCAGGAAAACAHTGTG |
| | C (p.Ile72Thr) | | | GAGTTGAAGGAAGCATTTCGT′] |
| 1343 | NM_001011658.3(TRAPPC2): c. | −1 | — | [′GCCTTAATTATTTCACATATGAGGTYTATTA |
| | 248T > C (p.Phe83Ser) | | | TGCTTCATGACATAAGACAA′] |
| 1344 | NM_001011658.3(TRAPPC2): c. | −1 | — | [′AGTTACCTTTACTAAGAAGGTAAGGRTATGC |
| | 238 + 4T > C | | | CCCGCAGTGACAAATGCCGA′] |
| 1345 | NM_003688.3(CASK): c.802T > C | 8573 | CASK | [′GGATCCAGCTGAAAGGATCACTGTTYATGA |
| | (p.Tyr268His) | | | AGCACTGAATCACCCATGGCT′] |
| 1346 | NM_003688.3(CASK): c.2740T > | 8573 | CASK | [′TGAGCTCGTGTGCACAGCCCCACAGYGGGT |
| | C (p.Trp914Arg) | | | CCCTGTCTCCTGGGTCTATTA′] |
| 1347 | NM_001159702.2(FHL1): c.457T > | 2273 | FHL1 | [′AGGGGAGGACTTCTACTGCGTGACTYGCCA |
| | C (p.Cys153Arg) | | | TGAGACCAAGTTTGCCAAGCA′] |
| 1348 | NM_001159702.2(FHL1): c.310T > | 2273 | FHL1 | [′GGAGGACTCCCCCAAGTGCAAGGGGYGCTT |
| | C (p.Cys104Arg) | | | CAAGGCCATTGTGGCAGGTAC′] |
| 1349 | NM_001159702.2(FHL1): c.625T > | 2273 | FHL1 | [′CACCGCTGTGGAGGACCAGTATTACYGCGT |
| | C (p.Cys209Arg) | | | GGATTGCTACAAGAACTTTGT′] |
| 1350 | NM_001363.4(DKC1): c.113T > C | 1736 | DKC1 | [′ATACAACACGCTGAAGAATTTCTTANCAAA |
| | (p.Ile38Thr) | | | CCTGAATCCAAAGTTGCTAAG′] |
| 1351 | NM_178152.2(DCX): c.373T > C | 1641 | DCX | [′CTTATTTCTTGCCTTAGGGGAAAGCYATGTC |
| | (p.Tyr125His) | | | TGTTCCTCAGACAACTTCTT′] |
| 1352 | NM_005183.3(CACNA1F): c.2267T > | 778 | CACNAF | [′ATCCTGTTGAACGTGTTTCTTGCCAYTGCTG |
| | C (p.Ile756Thr) | | | TGGACAACCTGGCCAGTGGA′] |
| 1353 | NM_001493.2(GDI1): c.275T > C | 2664 | GDI1 | [′ACAGGGCAGCTGGTAAAGATGCTACYGTAT |
| | (p.Leu92Pro) | | | ACAGAGGTGACTCGCTACCTG′] |
| 1354 | NM_006517.4(SLC16A2): c.1313T > | 6567 | SLC16A2 | [′ATCATGGCCCCCATTGCATTTGAGCYGGTGG |
| | C (p.Leu438Pro) | | | GCCCAATGCAGGCCTCACAG′] |
| 1355 | NM_006517.4(SLC16A2): c.1190T > | 6567 | SLC16A2 | [′CTCCAGGTCCTTTCCTTCCTGCTCCYGGGCC |
| | C (p.Leu397Pro) | | | TGATGTCCATGATGATTCCC′] |
| 1356 | NM_006517.4(SLC16A2): c.1481T > | 6567 | SLC16A2 | [′CCCCCCATCATCGGGGCTGTAATCCYCTTCT |
| | C (p.Leu494Pro) | | | TCGTCCCTCTGATGCATCAA′] |
| 1357 | NM_004586.2(RPS6KA3): c.803T > | 6197 | RPS6KA3 | [′GAAATGCTTACTGGTACACTCCCTTYCCAAG |
| | C (p.Phe268Ser) | | | GAAAAGATCGAAAAGAAACA′] |
| 1358 | NM_000489.4(ATRX): c.4840T > | 546 | ATRX | [′AAGTTTTCTTCATACAGTTCTTTTGYGTGAC |
| | C (p.Cys1614Arg) | | | AAACTGGATTTCAGCACGGC′] |
| 1359 | NM_000489.4(ATRX): c.6250T > | 546 | ATRX | [′GAAGTGGCTTCGAAACATTGACTATYACCGT |
| | C (p.Tyr2084His) | | | TTAGATGGTTCCACTACTGC′] |
| 1360 | NM_000489.4(ATRX): c.1226T > | 546 | ATRX | [′GATATTAAGAAGGCTCATCTTGCATYGGAA |
| | C (p.Leu409Ser) | | | GAAGACTTAAATTCCGAGTTT′] |
| 1361 | NM_000489.4(ATRX): c.6149T > | 546 | ATRX | [′CAGTCCCTCATATCTCTGGACTTGAYTGAAG |
| | C (p.Ile2050Thr) | | | ATTTTCTTGAATTAGCTAGT′] |
| | NM_001110556.1(FLNA): c.720 + | 2316 | FLNA | |
| | 2T > C | | | |
| 1362 | NM_001127899.3(CLCN5): c.1768T > | 1184 | CLCN5 | [′AGGTGGGGTGACTCGGATGACTGTTYCTCTT |
| | C (p.Ser590Pro) | | | GTTGTCATAATGTTTGAACT′] |
| 1363 | NM_004992.3(MECP2): c.464T > | 4204 | MECP2 | [′GACACATCCCTGGACCCTAATGATTBTGACT |
| | C (p.Phe155Ser) | | | TCACGGTAACTGGGAGAGGG′] |
| 1364 | NM_001061.4(TBXAS1): c.1463T > | 6916 | TBXAS1 | [′TGCCTCGGGGTGCGTCTAGGGCTGCYTGAG |
| | C (p.Leu488Pro) | | | GTCAAGTTGACACTGCTCCAC′] |
| 1365 | NM_001061.4(TBXAS1): c.248T > | 6916 | TBXAS1 | [′TTTTTTATTCCTCCCAGGTACTATCYTGGTCG |
| | C (p.Leu83Pro) | | | TCGGATGTTTATTGTTATT′] |
| 1366 | NM_000128.3(F11): c.901T > C | 2160 | F11 | [′TTCTTCATTTTACCATGACACTGATYTCTTGG |
| | (p.Phe301Leu) | | | GAGAAGAACTGGATATTGT′] |
| 1367 | NM_000128.3(F11): c.166T > C | 2160 | F11 | [′GGTAGTCTGCACTTACCACCCAAGAYGTTTA |
| | (p.Cys56Arg) | | | CTCTTCACTTTCACGGCGGA′] |
| 1368 | NM_000203.4(IDUA): c.1469T > | 3425 | IDUA | [′AGCCCCGACGGCGAGTGGCGGCGCCYGGGC |
| | C (p.Leu490Pro) | | | CGGCCCGTCTTCCCCACGGCA′] |
| 1369 | NM_000431.3(MVK): c.803T > C | 4598 | MVK | [′ATCGTGGCCCCCCTCCTGACCTCAAYAGATG |
| | (p.Ile268Thr) | | | CCATCTCCCTGGAGTGTGAG′] |
| 1370 | NM_014425.3 (INVS): c.1478T > | 27130 | INVS | [′TTATGCTTATAGGGAAGAACAGCTTYGCATT |
| | C (p.Leu493Ser) | | | GGTCCTGCAACAATGGATAC′] |
| 1371 | NM_000108.4(DLD): c.1178T > C | 1738 | DLD | [′GACTACAATTGTGTGCCATCAGTGAYTTACA |
| | (p.Ile393Thr) | | | CACACCCTGAAGTTGCTTGG′] |
| 1372 | NM_000170.2(GLDC): c.2T > C | 2731 | GLDC | [′GGGCAGGGGACGGTGGCCGCGGCCAYGCAG |
| | (p.Met1Thr) | | | TCCTGTGCCAGGGCGTGGGGG′] |
| 1373 | NM_000151.3(G6PC): c.229T > C | 2538 | G6PC | [′AGACTGGCTCAACCTCGTCTTTAAGYGGTAA |
| | (p.Trp77Arg) | | | GAACCATATAGAGAGGAGAT′] |
| 1374 | NM_004453.3 (ETFDH): c.2T > C | 2110 | ETFDH | [′CCGAGAGTCCTGGTGACTTTGAACAYGCTG |
| | (p.Met1Thr) | | | GTGCCGCTAGCCAAGCTGTCC′] |
| 1375 | NM_000136.2(FANCC): c.1661T > | −1 | — | [′CTGGCCCGAGAGCTCCTTAAAGAGCYGCGA |
| | C (p.Leu554Pro) | | | ACTCAAGTCTAGAAGGCACGC′] |
| 1376 | NM_000131.4(F7): c.38T > C | 2155 | F7 | [′GCCCTCAGGCTCCTCTGCCTTCTGCYTGGGC |
| | (p.Leu13Pro) | | | TTCAGGGCTGCCTGGCTGCA′] |
| 1377 | NM_000131.4(F7): c.983T > C | 2155 | F7 | [′CCCCTCTGCCTGCCCGAACGGACGTYCTCTG |
| | (p.Phe328Ser) | | | AGAGGACGCTGGCCTTCGTG′] |
| 1378 | NM_024649.4(BBS1): c.1553T > | −1 | — | [′ACAACCCGTCCTGTCCTGGGGCTGCYGGTCT |
| | C (p.Leu518Pro) | | | GCTTCCTGTACAACGAGGCG′] |
| 1379 | NM_000490.4(AVP): c.200T > C | 551 | AVP | [′TGCGCGGACGAGCTGGGCTGCTTCGYGGGC |
| | (p.Val67Ala) | | | ACGGCTGAGGCGCTGCGCTGC′] |
| 1380 | NM_000490.4(AVP): c.61T > C | 551 | AVP | [′CCTACTGGCCTTCTCCTCCGCGTGCYACTTC |
| | (p.Tyr21His) | | | CAGAACTGCCCGAGGGGCGG′] |
| 1381 | NM_001692.3 (ATP6V1B1): c.242T > | 525 | ATP6V1B1 | [′GGGACTCAGAGGAGCGGGCAGGTGCYTGAG |
| | C (p.Leu81Pro) | | | GTGGCTGGCACCAAGGCGATT′] |
| 1382 | NM_003361.3 (UMOD): c.649T > | 7369 | UMOD | [′GGGCGGTGCGCGCATGGCCGAGACCBGCGT |
| | C (p.Cys217Arg) | | | GCCAGTCCTGCGCTGCAACAC′] |
| 1383 | NM_003361.3 (UMOD): c.376T > | 7369 | UMOD | [′TAGCCACTGCCACGCCCTGGCCACAYGTGTC |
| | C (p.Cys126Arg) | | | AATGTGGTGGGCAGCTACTT′] |
| 1384 | NM_003361.3 (UMOD): c.943T > | 7369 | UMOD | [′CAAATCGAATAATGGCAGATGGCACYGCCA |
| | C (p.Cys315Arg) | | | GTGCAAACAGGACTTCAACAT′] |
| 1385 | NM_080911.2(UNG): c.752T > C | 7374 | UNG | [′AATCAGAACTCGAATGGCCTTGTTTYCTTGC |
| | (p.Phe251Ser) | | | TCTGGGGCTCTTATGCTCAG′] |
| 1386 | NM_199292.2(TH): c.707T > C | 7054 | TH | [′CAGGTGTACCGCCAGCGCAGGAAGCYGATT |
| | (p.Leu236Pro) | | | GCTGAGATCGCCTTCCAGTAC′] |
| 1387 | NM_001065.3(TNFRSF1A): c.175T > | 7132 | TNFRSF1A | [′CCACCCTCAAAATAATTCGATTTGCYGTACC |
| | C (p.Cys59Arg) | | | AAGTGCCACAAAGGTAGGGG′] |
| 1388 | NM_001065.3(TNFRSF1A): c.349T > | 7132 | TNFRSF1A | [′AATGGGTCAGGTGGAGATCTCTTCTYGCACA |
| | C (p.Cys117Arg) | | | GTGGACCGGGACACCGTGTG′] |
| 1389 | NM_000546.5(TP53): c.755T > C | 7157 | TP53 | [′GGCGGCATGAACCGGAGGCCCATCCYCACC |
| | (p.Leu252Pro) | | | ATCATCACACTGGAAGACTCC′] |
| 1390 | NM_000546.5(TP53): c.398T > C | 7157 | TP53 | [′CAGTACTCCCCTGCCCTCAACAAGAYGTTTT |
| | (p.Met133Thr) | | | GCCAACTGGCCAAGACCTGC′] |
| 1391 | NM_000546.5(TP53): c.1031T > C | 7157 | TP53 | [′GAGCGCTTCGAGATGTTCCGAGAGCYGAAT |
| | (p.Leu344Pro) | | | GAGGCCTTGGAACTCAAGGAT′] |
| 1392 | NM_001018005.1(TPM1): c.284T > | 7168 | TPM1 | [′TCTCTGAACAGACGCATCCAGCTGGYTGAG |
| | C (p.Val95Ala) | | | GAAGAGTTGGATCGTGCCCAG′] |
| 1393 | NM_001159287.1(TPI1): c.832T > | 7167 | TPI1 | [′GGGTGGTGCTTCCCTCAAGCCCGAAYTCGTG |
| | C (p.Phe278Leu) | | | GACATCATCAATGCCAAACA′] |
| 1394 | NM_003242.5(TGFBR2): c.923T > | 7048 | TGFBR2 | [′AAGCATGAGAACATACTCCAGTTCCYGACG |
| | C (p.Leu308Pro) | | | GCTGAGGAGCGGAAGACGGAG′] |
| 1395 | NM_000660.5(TGFB1): c.673T > | 7040 | TGFB1 | [′CTTTCGCCTTAGCGCCCACTGCTCCYGTGAC |
| | C (p.Cys225Arg) | | | AGCAGGGATAACACACTGCA′] |
| 1396 | NM_000660.5(TGFB1): c.241T > | 7040 | TGFB1 | [′GCTGCCCGAGGCCGTGCTCGCCCTGYACAA |
| | C (p.Tyr81His) | | | CAGCACCCGCGACCGGGTGGC′] |
| 1397 | NM_000660.5(TGFB1): c.667T > | 7040 | TGFB1 | [′TGAGGGCTTTCGCCTTAGCGCCCACNGCTCC |
| | C (p.Cys223Arg) | | | TGTGACAGCAGGGATAACAC′] |
| 1398 | NM_001128177.1(THRB): c.929T > | 7068 | THRB | [′ATCATCCTCCTCAAAGGCTGCTGCAYGGAG |
| | C (p.Met310Thr) | | | ATCATGTCCCTTCGCGCTGCT′] |
| 1399 | NM_001128177.1(THRB): c.1336T ? | 7068 | THRB | [′CCGCTTCCTGCACATGAAGGTGGAAYGCCC |
| | C (p.Cys446Arg) | | | CACAGAACTCTTCCCCCCTTT′] |
| 1400 | NM_001128177.1(THRB): c.1373T > | 7068 | THRB | [′CTCTTCCCCCCTTTGTTCTTGGAAGYGTTCG |
| | C (p.Val458Ala) | | | AGGATTAGACTGACTGGATT′] |
| 1401 | NM_007313.2(ABL1): c.814T > C | 25 | ABL1 | [′GAAGCACAAGCTGGGCGGGGGCCAGYACGG |
| | (p.Tyr272His) | | | GGAGGTGTACGAGGGCGTGTG′] |
| 1402 | NM_007313.2(ABL1): c.988T > C | 25 | ABL1 | [′AGGGGTCTGCACCCGGGAGCCCCCGYTCTA |
| | (p.Phe330Leu) | | | TATCATCACTGAGTTCATGAC′] |
| 1403 | NM_007313.2(ABL1): c.1109T > | 25 | ABL1 | [′ATGGCCACTCAGATCTCGTCAGCCAYGGAG |
| | C (p.Met370Thr) | | | TACCTGGAGAAGAAAAACTTC′] |
| 1404 | NM_021961.5(TEAD1): c.1261T > | 7003 | TEAD1 | [′TGAACACGGAGCACAACATCATATTYACAG |
| | C (p.Tyr?His) | | | GCTTGTAAAGGACTGAACATG′] |
| 1405 | NM_001256850.1(TTN): c.2926T > | 7273 | TTN | [′TGGATACCCATCCCCGACAGTGACAHGGTA |
| | C (p.Trp976Arg) | | | CAGGGAAGACTACCAAATCGA′] |
| 1406 | NM_133378.4(TTN): c.100163T > | −1 | — | [′GAAAACACAGATGACCTGACAACCCYGATC |
| | C (p.Leu33388Pro) | | | ATCATGGACGTACAGAAACAA′] |
| 1407 | NM_003235.4(TG): c.3733T > C | 7038 | TG | [′CCCCACAGGCTCTGCCATGCAGCAGYGCCA |
| | (p.Cys1245Arg) | | | ATTGCTGTGCCGCCAGGGCTC′] |
| 1408 | NM_003235.4(TG): c.3229T > C | 7038 | TG | [′TCTCTCTCCCACAGGCCCGACAACCYGCGAG |
| | (p.Cys1077Arg) | | | AAATCTCGAACCAGTGGGCT′] |
| 1409 | NM_000733.3(CD3E): c.520 + 2T > | 916 | CD3E | [′CGGGTGCTGGCGGCAGGCAAAGGGGYAAGG |
| | C | | | CTGTGGAGTCCAGTCAGAGGA′] |
| 1410 | NM_003000.2(SDHB): c.487T > C | 6390 | SDHB | [′GCCTTATTTGAAGAAGAAGGATGAAYCTCA |
| | (p.Ser163Pro) | | | GGAAGGCAAGCAGCAGTATCT′] |
| 1411 | NM_003106.3(SOX2): c.290T > C | −1 | — | [′CCGTTCATCGACGAGGCTAAGCGGCYGCGA |
| | (p.Leu97Pro) | | | GCGCTGCACATGAAGGAGCAC′] |
| 1412 | NM_001024858.2(SPTB): c.604T > | 6710 | SPTB | [′TAATGTCACCAACTTTACCTCCAGCYGGAAG |
| | C (p.Trp202Arg) | | | GATGGCTTGGCCTTTAATGC′] |
| 1413 | NM_001024858.2(SPTB): c.6055T > | 6710 | SPTB | [′GGTGTGCCAGTTCTCGAGGGATGCCYCTGTG |
| | C (p.Ser2019Pro) | | | GCTGAGGCGTGGCTGATTGC′] |
| 1414 | NM_003126.2(SPTA1): c.779T > | 6708 | SPTA1 | [′TTGGCTCTCCAGAGACAGAAAGCTCBGTCCA |
| | C (p.Leu260Pro) | | | ATGCTGCAAACTTACAACGA′] |
| 1415 | NM_003126.2(SPTA1): c.781T > | 6708 | SPTA1 | [′GGCTCTCCAGAGACAGAAAGCTCTGYCCAA |
| | C (p.Ser261Pro) | | | TGCTGCAAACTTACAACGATT′] |
| 1416 | NM_003126.2(SPTA1): c.620T > | 6708 | SPTA1 | [′AAATTTGAAGACTTCCAAGTGGAGCYGGTA |
| | C (p.Leu207Pro) | | | GCTAAAGAAGGGAGAGTTGTT′] |
| 1417 | NM_005633.3(SOS1): c.1294T > | 6654 | SOS1 | [′CGAGATTCAGAAGAATATTGATGGTYGGGA |
| | C (p.Trp432Arg) | | | GGGAAAAGACATTGGACAGTG′] |
| 1418 | NM_006920.4(SCN1A): c.3577T > | −1 | — | [′TGTGGAAGAAGGCAGAGGAAAACAAYGGT |
| | C (p.Trp1193Arg) | | | GGAACCTGAGAAGGACGTGTTT′] |
| 1419 | NM_006920.4(SCN1A): c.4250T > | −1 | — | [′TTTGGGTATCTCTCTTTGCTTCAAGYTGTAA |
| | C (p.Val1417Ala) | | | GTGAACACTATTTTCTCTGA′] |
| 1420 | NM_006920.4(SCN1A): c.434T > | 6323 | SCN1A | [′ACTATTTTGACAAACTGTGTGTTTAHGACAA |
| | C (p.Met145Thr) | | | TGAGTAACCCTCCTGATTGG′] |
| 1421 | NM_006920.4(SCN1A): c.4462T > | −1 | — | [′TCTATACTTTGGAGGTCAAGACATCYTTATG |
| | C (p.Phe1488Leu) | | | ACAGAAGAACAGAAGAAATA′] |
| 1422 | NM_152296.4(ATP1A3): c.821T > | 478 | ATP1A3 | [′GGGCTGGAGGTGGGCAAGACGCCCAHCGCC |
| | C (p.Ile274Thr) | | | ATCGAGATTGAGCACTTCATC′] |
| 1423 | NM_152296.4(ATP1A3): c.2338T > | 478 | ATP1A3 | [′CAGCAATATCCCGGAGATCACGCCCYTCCTG |
| | C (p.Phe780Leu) | | | CTGTTCATCATGGCCAACAT′] |
| 1424 | NM_000702.3(ATP1A2): c.2291T > | 477 | ATP1A2 | [′CCTCAGAATCTCCCCACAGGCCGCCYGATCT |
| | C (p.Leu764Pro) | | | TTGACAACTTGAAGAAATCC′] |
| 1425 | NM_000702.3(ATP1A2): c.2659T > | 477 | ATP1A2 | [′ACGGCTACTGGGAATCCGCCTCGACYGGGA |
| | C (p.Trp887Arg) | | | TGACCGGACCATGAATGATCT′] |
| 1426 | NM_000702.3(ATP1A2): c.2192T > | 477 | ATP1A2 | [′AAGAAGGCTGACATTGGCATTGCCAYGGGC |
| | C (p.Met731Thr) | | | ATCTCTGGCTCTGACGTCTCT′] |
| 1427 | NM_000702.3(ATP1A2): c.857T > | 477 | ATP1A2 | [′GGGCGGACACCCATAGCAATGGAGAYTGAA |
| | C (p.Ile286Thr) | | | CACTTCATCCAGCTGATCACA′] |
| 1428 | NM_001035.2(RYR2): c.1298T > | 6262 | RYR2 | [′ATGTTTATGGTTTATTTTAGGGGCCYTGATG |
| | C (p.Leu433Pro) | | | CTCTCAGCAAGAAAGCGAAG′] |
| 1429 | NM_000540.2(RYR1): c.14693T > | 6261 | RYR1 | [′GTGGGTGTCCGGGCTGGCGGAGGCAYTGGG |
| | C (p.Ile4898Thr) | | | GACGAGATCGAGGACCCCGCG′] |
| 1430 | NM_000539.3(RHO): c.133T > C | 6010 | RHO | [′GTTCTCCATGCTGGCCGCCTACATGYTTCTG |
| | (p.Phe45Leu) | | | CTGATCGTGCTGGGCTTCCC′] |
| 1431 | NM_000321.2(RB1): c.1960+2T > | 5925 | RB1 | [′CTCTTTCACTGTTTTATAAAAAAGGYTAGTA |
| | C | | | GATGATTATTTTCAAGAGCA′] |
| 1432 | NM_000321.2(RB1): c.2134T > C | 5925 | RB1 | [′TATGATGTGTTCCATGTATGGCATAYGCAAA |
| | (p.Cys712Arg) | | | GTGAAGAATATAGACCTTAA′] |
| 1433 | NM_000329.2(RPE65): c.1022T > | 6121 | RPE65 | [′AGATTTGAGTTTGTTTATAATTACTYATATTT |
| | C (p.Leu341Ser) | | | AGCCAATTTACGTGAGAAC′] |
| 1434 | NM_000322.4(PRPH2): c.554T > | 5961 | PRPH2 | [′ATTCAGTGGATCAGCAATCGCTACCYGGACT |
| | C (p.Leu185Pro) | | | TTTCCTCCAAAGAAGTCAAA′] |
| 1435 | NM_000322.4(PRPH2): c.2T > C | 5961 | PRPH2 | [′CAACCCGGACTACACTTGGCAAGCAYGGCG |
| | (p.Met1Thr) | | | CTACTGAAAGTCAAGTTTGAC′] |
| 1436 | NM_001098668.2(SFTPA2): c. | 729238 | SFTPA2 | [′ACTGAGGGTCCCAGCCCTGGAGACTYCCGC |
| | 593T > C (p.Phe198Ser) | | | TACTCAGATGGGACCCCTGTA′] |
| 1437 | NM_003018.3(SFTPC): c.218T > | 6440 | SFTPC | [′TTTCCCCAGGTTCTGGAGATGAGCAHTGGGG |
| | C (p.Ile73Thr) | | | CGCCGGAAGCCCAGCAACGC′] |
| 1438 | NM_003018.3 (SFTPC): c.581T > | 6440 | SFTPC | [′AGCACCCTGTGTGGCGAGGTGCCGCYCTACT |
| | C (p.Leu194Pro) | | | ACATCTAGGACGCCTCCGGT′] |
| 1439 | NM_000055.2(BCHE): c.1004T > | 590 | BCHE | [′CTCACTGACATGCCAGACATATTACYTGAAC |
| | C (p.Leu335Pro) | | | TTGGACAATTTAAAAAAACC′] |
| 1440 | NM_002739.3(PRKCG): c.355T > | 5582 | PRKCG | [′CCCCACCTTCTGCGACCACTGTGGCYCCCTC |
| | C (p.Ser119Pro) | | | CTCTACGGGCTTGTGCACCA′] |
| 1441 | NM_002739.3(PRKCG): c.1927T > | 5582 | PRKCG | [′ACAGTGTGGCCGCAGCGGCGAGAACYTTGA |
| | C (p.Phe643Leu) | | | CAAGTTCTTCACGCGGGCGGC′] |
| 1442 | NM_000141.4(FGFR2): c.1018T > | 2263 | FGFR2 | [′TGTAACTTTTGAGGACGCTGGGGAAYATAC |
| | C (p.Tyr340His) | | | GTGCTTGGCGGGTAATTCTAT′] |
| 1443 | NM_000141.4(FGFR2): c.1024T > | 2263 | FGFR2 | [′TTTTGAGGACGCTGGGGAATATACGHGCTTG |
| | C (p.Cys342Arg) | | | GCGGGTAATTCTATTGGGAT′] |
| 1444 | NM_000141.4(FGFR2): c.868T > | 2263 | FGFR2 | [′CAGTGATGCCCAGCCCCACATCCAGBGGAT |
| | C (p.Trp290Arg) | | | CAAGCACGTGGAAAAGAACGG′] |
| 1445 | NM_000141.4(FGFR2): c.799T > | 2263 | FGFR2 | [′CCAAGCCGGACTGCCGGCAAATGCCYCCAC |
| | C (p.Ser267Pro) | | | AGTGGTCGGAGGAGACGTAGA′] |
| 1446 | NM_000506.3(F2): c.1139T > C | 2147 | F2 | [′CCTGCTGCCCCTCCCAGGCAGGTGAYGCTTT |
| | (p.Met380Thr) | | | TCCGGAAGAGTCCCCAGGAG′] |
| 1447 | NM_000313.3 (PROS1): c.1501T > | 5627 | PROS1 | [′TTCATTATTTTAAATAGATAATGTABCCAGT |
| | C (p.Ser501Pro) | | | GCTGAGGGTTGGCATGTAAA′] |
| 1448 | NM_002834.3(PTPN11): c.854T > | 5781 | PTPN11 | [′TGACCGTGGTCTCTTTTTCTTCTAGNTGATCA |
| | C (p.Phe285Ser) | | | TACCAGGGTTGTCCTACAC′] |
| 1449 | NM_002755.3(MAP2K1): c.158T > | 5604 | MAP2K1 | [′CAGCAGCGAAAGCGCCTTGAGGCCTYTCTT |
| | C (p.Phe53Ser) | | | ACCCAGAAGCAGAAGGTGGGA′] |
| 1450 | NM_001042465.1(PSAP): c.1055T > | 5660 | PSAP | [′GCTTTTGACAAAATGTGCTCGAAGCYGCCG |
| | C (p.Leu352Pro) | | | AAGTCCCTGTCGGAAGAGTGC′] |
| 1451 | NM_000207.2(INS): c.143T > C | −1 | — | [′TACCTAGTGTGCGGGGAACGAGGCTBCTTCT |
| | (p.Phe48Ser) | | | ACACACCCAAGACCCGCCGG′] |
| 1452 | NM_000311.3(PRNP): c.593T > C | 5621 | PRNP | [′ACCACAACCACCAAGGGGGAGAACTYCACC |
| | (p.Phe198Ser) | | | GAGACCGACGTTAAGATGATG′] |
| 1453 | NM_000371.3(TTR): c.149T > C | 7276 | TTR | [′GGCAGTCCTGCCATCAATGTGGCCGBGCATG |
| | (p.Val50Ala) | | | TGTTCAGAAAGGCTGCTGAT′] |
| 1454 | NM_000371.3(TTR): c.224T > C | 7276 | TTR | [′AGGAAAACCAGTGAGTCTGGAGAGCYGCAT |
| | (p.Leu75Pro) | | | GGGCTCACAACTGAGGAGGAA′] |
| 1455 | NM_000371.3(TTR): c.88T > C | 7276 | TTR | [′CACCCAGGGCACCGGTGAATCCAAGYGTCC |
| | (p.Cys30Arg) | | | TCTGATGGTCAAAGTTCTAGA′] |
| 1456 | NM_000371.3(TTR): c.272T > C | 7276 | TTR | [′GAATTTGTAGAAGGGATATACAAAGYGGAA |
| | (p.Val91Ala) | | | ATAGACACCAAATCTTACTGG′] |
| 1457 | NM_000371.3(TTR): c.400T > C | 7276 | TTR | [′CACCATTGCCGCCCTGCTGAGCCCCYACTCC |
| | (p.Tyr134His) | | | TATTCCACCACGGCTGTCGT′] |
| 1458 | NM_000371.3(TTR): c.250T > C | 7276 | TTR | [′GCATGGGCTCACAACTGAGGAGGAAYTTGT |
| | (p.Phe84Leu) | | | AGAAGGGATATACAAAGTGGA′] |
| 1459 | NM_000371.3(TTR): c.157T > C | 7276 | TTR | [′TGCCATCAATGTGGCCGTGCATGTGHTCAGA |
| | (p.Phe53Leu) | | | AAGGCTGCTGATGACACCTG′] |
| 1460 | NM_000371.3(TTR): c.95T > C | 7276 | TTR | [′GGCACCGGTGAATCCAAGTGTCCTCYGATG |
| | (p.Leu32Pro) | | | GTCAAAGTTCTAGATGCTGTC′] |
| 1461 | NM_000371.3(TTR): c.191T > C | 7276 | TTR | [′GCTGCTGATGACACCTGGGAGCCATYTGCCT |
| | (p.Phe64Ser) | | | CTGGGTAAGTTGCCAAAGAA′] |
| 1462 | NM_000371.3(TTR): c.265T > C | 7276 | TTR | [′TGAGGAGGAATTTGTAGAAGGGATAYACAA |
| | (p.Tyr89His) | | | AGTGGAAATAGACACCAAATC′] |
| 1463 | NM_000217.2(KCNA1): c.1223T > | 3736 | KCNA1 | [′ATTGCCCTGCCCGTACCTGTCATTGYGTCCA |
| | C (p.Val408Ala) | | | ATTTCAACTATTTCTACCAC′] |
| 1464 | NM_000174.4(GP9): c.212T > C | 2815 | GP9 | [′CTTCAGTCCGTGCCCCCGGGAGCCTBTGACC |
| | (p.Phe71Ser) | | | ACCTGCCCCAGCTGCAGACC′] |
| 1465 | NM_000174.4(GP9): c.167T > C | 2815 | GP9 | [′GCCCTGCCGGCCCGCACCCGCCACCYTCTGC |
| | (p.Leu56Pro) | | | TGGCCAACAACAGCCTTCAG′] |
| 1466 | NM_000174.4(GP9): c.70T > C | 2815 | GP9 | [′GGCCACCAAGGACTGCCCCAGCCCAYGTAC |
| | (p.Cys24Arg) | | | CTGCCGCGCCCTGGAAACCAT′] |
| 1467 | NM_000174.4(GP9): c.20T > C | 2815 | GP9 | [′TGTCCCATGCCTGCCTGGGGAGCCCYGTTCC |
| | (p.Leu7Pro) | | | TGCTCTGGGCCACAGCAGAG′] |
| 1468 | NM_001001547.2(CD36): c.760T > | 948 | CD36 | [′CGATTTTTAAACAGATGCAGCCTCABTTCCA |
| | C (p.Phe254Leu) | | | CCTTTTGTTGAGAAAAGCCA′] |
| 1469 | NM_000212.2(ITGB3): c.2332T > | −1 | — | [′CAACCCACTGTATAAAGAGGCCACGYCTAC |
| | C (p.Ser778Pro) | | | CTTCACCAATATCACGTACCG′] |
| 1470 | NM_000212.2(ITGB3): c.176T > | 3690 | ITGB3 | [′GCTCCTGTCTTACAGGCCCTGCCTCYGGGCT |
| | C (p.Leu59Pro) | | | CACCTCGCTGTGACCTGAAG′] |
| 1471 | NM_000301.3(PLG): c.1771T > C | 5340 | PLG | [′AGGGGGGTGTGTGGCCCACCCACATYCCTG |
| | (p.Ser591Pro) | | | GCCCTGGCAAGTCAGTCTTAG′] |
| 1472 | NM_001122757.2(POU1F1): c. | 5449 | POU1F1 | [′CAAACTGAAAGCAATATTATCCAAAYGGCT |
| | 655T > C (p.Trp219Arg) | | | GGAGGAAGCTGAGCAAGTAGG′] |
| 1473 | NM_000293.2(PHKB): c.2923T > | 5257 | PHKB | [′ACCAACCCTGTCAGATATGACCATGHATGA |
| | C (p.Tyr975His) | | | GATGAATTTCTCTCTCCTTGT′] |
| 1474 | NM_004577.3(PSPH): c.155T > C | 5723 | PSPH | [′CTCCCTCCTAGGACACGGCGAGCCAYGGGC |
| | (p.Met52Thr) | | | GGGGCAGTGCCTTTCAAAGCT′] |
| 1475 | NM_000175.3(GPI): c.1574T > C | 2821 | GPI | [′CTGGGAAAGCAGCTGGCTAAGAAAABAGAG |
| | (p.Ile525Thr) | | | CCTGAGCTTGATGGCAGTGCT′] |
| 1476 | NM_000175.3(GPI): c.1016T > C | 2821 | GPI | [′TTTGGGTGTGAGACACACGCCATGCYGCCCT |
| | (p.Leu339Pro) | | | ATGACCAGTACCTGCACCGC′] |
| 1477 | NM_000478.4(ALPL): c.1306T > | 249 | ALPL | [′ACGAGAGAATGTCTCCATGGTGGACYATGG |
| | C (p.Tyr436His) | | | TGAGACCTCCAGGACCCAGGG′] |
| 1478 | NM_000478.4(ALPL): c.979T > C | 249 | ALPL | [′GATCCTGCGGAAGAACCCCAAAGGCYTCTT |
| | (p.Phe327Leu) | | | CTTGCTGGTGGAAGGTAGGGA′] |
| 1479 | NM_018849.2(ABCB4): c.1207T > | 5244 | ABCB4 | [′GGAGTTCAATGATGTTCACTTTTCTYACCCT |
| | C (p.Tyr403His) | | | TCTCGAGCTAACGTCAAGGT′] |
| 1480 | NM_198965.1(PTHLH): c.179T > | 5744 | PTHLH | [′CAAGATTTACGGCGACGATTCTTCCYTCACC |
| | C (p.Leu60Pro) | | | ATCTGATCGCAGAAATCCAC′] |
| 1481 | NM_198965.1(PTHLH): c.131T > | 5744 | PTHLH | [′AGAGCTGTGTCTGAACATCAGCTCCYCCATG |
| | C (p.Leu44Pro) | | | ACAAGGGGAAGTCCATCCAA′] |
| 1482 | NM_000315.2(PTH): c.52T > C | 5741 | PTH | [′AGTTATGATTGTCATGTTGGCAATTYGTTTT |
| | (p.Cys18Arg) | | | CTTACAAAATCGGATGGGAA′] |
| 1483 | NM_000315.2(PTH): c.67T > C | 5741 | PTH | [′GTTGGCAATTTGTTTTCTTACAAAAYCGGAT |
| | (p.Ser23Pro) | | | GGGAAATCTGTTAAGTAAGT′] |
| 1484 | NM_003122.4(SPINK1): c.2T > C | 6690 | SPINK1 | [′ACCTCTGGACGCAGAACTTCAGCCAYGAAG |
| | (p.Met1Thr) | | | GTAACAGGCATCTTTCTTCTC′] |
| 1485 | NM_003122.4(SPINK1): c.41T > | 6690 | SPINK1 | [′ATCTTTCTTCTCAGTGCCTTGGCCCBGTTGA |
| | C (p.Leu14Pro) | | | GTCTATCTGGTAAGTGTTGC′] |
| 1486 | NM_006194.3(PAX9): c.62T > C | 5083 | PAX9 | [′GGAGTGTTCGTGAACGGGAGGCCGCYGCCC |
| | (p.Leu21Pro) | | | AACGCCATCCGGCTTCGCATC′] |
| 1487 | NM_005188.3(CBL): c.1111T > C | 867 | CBL | [′TTAATCAAAGGAACAATATGAATTAHACTG |
| | (p.Tyr371His) | | | TGAGATGGGCTCCACATTCCA′] |
| 1488 | NM_005247.2(FGF3): c.466T > C | 2248 | FGF3 | [′CAGCGCCGAGAGACTGTGGTACGTGYCTGT |
| | (p.Ser156Pro) | | | GAACGGCAAGGGCCGGCCCCG′] |
| 1489 | NM_005247.2(FGF3): c.17T > C | 2248 | FGF3 | [′GATGCCACGATGGGCCTAATCTGGCYGCTA |
| | (p.Leu6Pro) | | | CTGCTCAGCCTGCTGGAGCCC′] |
| 1490 | NM_000222.2(KIT): c.1676T > C | 3815 | KIT | [′CCCATGTATGAAGTACAGTGGAAGGNTGTT |
| | (p.Val559Ala) | | | GAGGAGATAAATGGAAACAAT′] |
| 1491 | NM_005249.4(FOXG1): c.643T > | 2290 | FOXG1 | [′CATCTACGAGTTCATCATGAAGAACYTCCCT |
| | C (p.Phe215Leu) | | | TACTACCGCGAGAACAAGCA′] |
| 1492 | NM_001127500.1(MET): c.3446T > | 4233 | MET | [′CAATTTCTGACCGAGGGAATCATCAYGAAA |
| | C (p.Met1149Thr) | | | GATTTTAGTCATCCCAATGTC′] |
| 1493 | NM_020975.4(RET): c.1858T > C | 5979 | RET | [′CTTCCCTGAGGAGGAGAAGTGCTTCNGCGA |
| | (p.Cys620Arg) | | | GCCCGAAGACATCCAGGGTGA′] |
| 1494 | NM_020975.4(RET): c.1900T > C | 5979 | RET | [′CACAGATCCACTGTGCGACGAGCTGNGCCG |
| | (p.Cys634Arg) | | | CACGGTGATCGCAGCCGCTGT′] |
| 1495 | NM_020975.4(RET): c.2753T > C | 5979 | RET | [′TAGGGTCGGATTCCAGTTAAATGGAYGGCA |
| | (p.Met918Thr) | | | ATTGAATCCCTTTTTGATCAT′] |
| 1496 | NM_020630.4(RET): c.1852T > C | 5979 | RET | [′CAACTGCTTCCCTGAGGAGGAGAAGNGCTT |
| | (p.Cys618Arg) | | | CTGCGAGCCCGAAGACATCCA′] |
| 1497 | NM_020630.4(RET): c.1825T > C | 5979 | RET | [′GGGGATTAAAGCTGGCTATGGCACCNGCAA |
| | (p.Cys609Arg) | | | CTGCTTCCCTGAGGAGGAGAA′] |
| 1498 | NM_013251.3(TAC3): c.269T > C | 6866 | TAC3 | [′ATGCATGACTTCTTTGTGGGACTTAYGGGCA |
| | (p.Met90Thr) | | | AGAGGAGCGTCCAGCCAGGT′] |
| 1499 | NM_006158.4(NEFL): c.281T > C | 4747 | NEFL | [′ATCCGCACGCAGGAGAAGGCGCAGCYCCAG |
| | (p.Leu94Pro) | | | GACCTCAATGACCGCTTCGCC′] |
| 1500 | NM_006177.3(NRL): c.479T > C | 4901 | NRL | [′TGCGGGCGCGACGAGGCGCTGCGGCYGAAG |
| | (p.Leu160Pro) | | | CAGAGGCGCCGCACGCTGAAG′] |
| 1501 | NM_000432.3(MYL2): c.52T > C | 4633 | MYL2 | [′AGCCGGGGGCGCCAACTCCAACGTGYTCTC |
| | (p.Phe18Leu) | | | CATGTTCGAACAGACCCAAAT′] |
| 1502 | NM_000257.3(MYH7): c.1046T > | 4625 | MYH7 | [′TTCACTTCAGAGGAGAAAAACTCCAYGTAT |
| | C (p.Met349Thr) | | | AAGCTGACAGGCGCCATCATG′] |
| 1503 | NM_000257.3(MYH7): c.1594T > | 4625 | MYH7 | [′GCTTCCTCAGCCCATGGGCATCATGYCCATC |
| | C (p.Ser532Pro) | | | CTGGAAGAGGAGTGCATGTT′] |
| 1504 | NM_000257.3(MYH7): c.5378T > | 4625 | MYH7 | [′AACATGGAACAGACCATTAAGGACCYGCAG |
| | C (p.Leu1793Pro) | | | CACCGGCTGGACGAAGCCGAG′] |
| 1505 | NM_001040113.1(MYH11): c. | 4629 | MYH11 | [′GAGGTGGAACATAAGAAGAAGAAGCYGGA |
| | 3791T > C (p.Leu1264Pro) | | | GGCGCAGGTGCAGGAGCTGCAG′] |
| 1506 | NM_000530.6(MPZ): c.404T > C | 4359 | MPZ | [′TGTGACGTCAAAAACCCTCCAGACAYAGTG |
| | (p.Ile135Thr) | | | GGCAAGACCTCTCAGGTCACG′] |
| 1507 | NM_000530.6(MPZ): c.341T > C | 4359 | MPZ | [′CGCTGGAAGGATGGCTCCATTGTCAYACAC |
| | (p.Ile114Thr) | | | AACCTAGACTACAGTGACAAT′] |
| 1508 | NM_016835.4(MAPT): c.1839T > | 4137 | MAPT | [′AGTCCAAGTGTGGCTCAAAGGATAAYATCA |
| | C (p.Asn613=) | | | AACACGTCCCGGGAGGCGGCA′] |
| 1509 | NM_198159.2(MITF): c.1051T > | 4286 | MITF | [′GAACAAGGGAACCATCTTAAAAGCAYCCGT |
| | C (p.Ser351Pro) | | | GGACTATATCCGAAAGTTGCA′] |
| 1510 | NM_198159.2(MITF): c.1195T > | 4286 | MITF | [′AATGCAGGCTCGAGCTCATGGACTTYCCCTT |
| | C (p.Ser399Pro) | | | ATTCCATCCACGGGTCTCTG′] |
| 1511 | NM_000426.3 (LAMA2): c.7691T > | 3908 | LAMA2 | [′ACCAAGAATGAGTCCGGCATCATTCYTTTGG |
| | C (p.Leu2564Pro) | | | GAAGTGGAGGGACACCAGCA′] |
| 1512 | NM_000426.3(LAMA2): c.2584T > | 3908 | LAMA2 | [′ACAACCCTCTGTACCTGGAGGATCAYGTCA |
| | C (p.Cys862Arg) | | | GCCATGCCAATGCAATGACAA′] |
| 1513 | NM_002435.2(MPI): c.413T > C | 4351 | MPI | [′CCCGATGCCAACCACAAGCCAGAGAYGGCC |
| | (p.Met138Thr) | | | ATTGCCCTCACCCCCTTCCAG′] |
| 1514 | NM_000239.2(LYZ): c.221T > C | 4069 | LYZ | [′GGAGACAGAAGCACTGATTATGGGAYATTT |
| | (p.Ile74Thr) | | | CAGATCAATAGCCGCTACTGG′] |
| 1515 | NM_000239.2(LYZ): c.244T > C | 4069 | LYZ | [′GATATTTCAGATCAATAGCCGCTACHGGTGT |
| | (p.Trp82Arg) | | | AATGATGGCAAAACCCCAGG′] |
| 1516 | NM_000233.3(LHCGR): c.1627T > | −1 | — | [CAATGTGGTGGCCTTCTTCATAATTYGTGCT |
| | C (p.Cys543Arg) | | | TGCTACATTAAAATTTATTT′] |
| 1517 | NM_000233.3(LHCGR): c.1193T > | −1 | — | [′AAACTTACAGTGCCTCGTTTTCTCAYGTGCA |
| | C (p.Met398Thr) | | | ATCTCTCCTTTGCAGACTTT′] |
| 1518 | NM_000233.3 (LHCGR): c.391T > | −1 | — | [′TCCTGTCCCTAATCACAGGAGCATCYGTAAC |
| | C (p.Cys131Arg) | | | ACAGGCATCAGAAAGTTTCC′] |
| 1519 | NM_000233.3(LHCGR): c.1103T > | −1 | — | [′GACTTCCTTAGGGTCCTGATTTGGCYGATTA |
| | C (p.Leu368Pro) | | | ATATTCTAGCCATCATGGGA′] |
| 1520 | NM_000233.3(LHCGR): c.1505T > | −1 | — | [′TCTTCTCTAATTGCTATGTTGCCCCYTGTCGG |
| | C (p.Leu502Pro) | | | TGTCAGCAATTACATGAAG′] |
| 1521 | NM_170707.3(LMNA): c.1589T > | 4000 | LMNA | [′TGCGGGAACAGCCTGCGTACGGCTCYCATC |
| | C (p.Leu530Pro) | | | AACTCCACTGGGGAAGTAAGT′] |
| 1522 | NM_170707.3(LMNA): c.1139T > | 4000 | LMNA | [′GAGATCCACGCCTACCGCAAGCTCTYGGAG |
| | C (p.Leu380Ser) | | | GGCGAGGAGGAGAGGTGGGCT′] |
| 1523 | NM_002292.3(LAMB2): c.961T > | 3913 | LAMB2 | [′CAAACACAACACACGTGGCCTCAACYGCGA |
| | C (p.Cys321Arg) | | | GCAGTGTCAGGATTTCTATCG′] |
| 1524 | NM_000228.2(LAMB3): c.565 − | 3914 | LAMB3 | [′AAATCCATAAGGTTAAGTTGGACCTRCAGA |
| | 3T > C | | | GGGAAGGGAAAGAGAAGCGCT′] |
| 1525 | NM_000421.3(KRT10): c.482T > | −1 | — | [CTGAATGACCGCCTGGCTTCCTACTYGGACA |
| | C (p.Leu161Ser) | | | AAGTTCGGGCTCTGGAAGAA′] |
| 1526 | NM_000421.3(KRT10): c.449T > | −1 | — | [′CTCTCTGGAAATGAAAAAGTAACCABGCAG |
| | C (p.Met150Thr) | | | AATCTGAATGACCGCCTGGCT′] |
| 1527 | NM_000422.2(KRT17): c.263T > | 3872 | KRT17 | [′CTGGCTGGAGGTGAGAAGGCCACCAHGCAG |
| | C (p.Met88Thr) | | | AACCTCAATGACCGCCTGGCC′] |
| 1528 | NM_000422.2(KRT17): c.284T > | 3872 | KRT17 | [′ACCATGCAGAACCTCAATGACCGCCHGGCC |
| | C (p.Leu95Pro) | | | TCCTACCTGGACAAGGTGCGT′] |
| 1529 | NM_000422.2(KRT17): c.296T > | 3872 | KRT17 | [′CTCAATGACCGCCTGGCCTCCTACCYGGACA |
| | C (p.Leu99Pro) | | | AGGTGCGTGCCCTGGAGGAG′] |
| 1530 | NM_005557.3(KRT16): c.395T > | 3868 | KRT16 | [′CTCAATGACCGCCTGGCCTCCTACCYGGACA |
| | C (p.Leu132Pro) | | | AGGTGCGTGCTCTGGAGGAG′] |
| 1531 | NM_005557.3(KRT16): c.362T > | 3868 | KRT16 | [′CTGGTGGGCAGTGAGAAGGTGACCAHGCAG |
| | C (p.Met121Thr) | | | AACCTCAATGACCGCCTGGCC′] |
| 1532 | NM_000526.4(KRT14): c.1151T > | 3861 | KRT14 | [′ATGATTGGCAGCGTGGAGGAGCAGCYGGCC |
| | C (p.Leu384Pro) | | | CAGCTCCGCTGCGAGATGGAG′] |
| 1533 | NM_000526.4(KRT14): c.356T > | 3861 | KRT14 | [′CTGGTGGGCAGTGAGAAGGTGACCAYGCAG |
| | C (p.Met119Thr) | | | AACCTCAATGACCGCCTGGCC′] |
| 1534 | NM_000526.4(KRT14): c.1243T > | 3861 | KRT14 | [′GCGGCTGGAGCAGGAGATCGCCACCYACCG |
| | C (p.Tyr415His) | | | CCGCCTGCTGGAGGGCGAGGA′] |
| 1535 | NM_153490.2(KRT13): c.356T > | 3860 | KRT13 | [′CTCAACGACCGCCTGGCTTCCTACCYGGAGA |
| | C (p.Leu119Pro) | | | AGGTGCGCGCCCTGGAGGAG′] |
| 1536 | NM_002273.3(KRT8): c.160T > C | 3856 | KRT8 | [′CTTTCGCGGTGGCCTGGGCGGCGGCHATGGT |
| | (p.Tyr54His) | | | GGGGCCAGCGGCATGGGAGG′] |
| 1537 | NM_000424.3(KRT5): c.1388T > | 3852 | KRT5 | [′GAGCTCATGAACACCAAGCTGGCCCYGGAC |
| | C (p.Leu463Pro) | | | GTGGAGATCGCCACTTACCGC′] |
| 1538 | NM_000424.3(KRT5): c.980T > C | 3852 | KRT5 | [′TCTGACACCTCAGTGGTCCTCTCCAHGGACA |
| | (p.Met327Thr) | | | ACAACCGCAACCTGGACCTG′] |
| 1539 | NM_000424.3(KRT5): c.20T > C | 3852 | KRT5 | [′GCCACCATGTCTCGCCAGTCAAGTGYGTCCT |
| | (p.Val7Ala) | | | TCCGGAGCGGGGGCAGTCGT′] |
| 1540 | NM_000424.3(KRT5): c.541T > C | 3852 | KRT5 | [′CAAGACCCTCAACAATAAGTTTGCCYCCTTC |
| | (p.Ser181Pro) | | | ATCGACAAGGTGAGCTACGA′] |
| 1541 | NM_000208.2(INSR): c.779T > C | 3643 | INSR | [′TGCGTGGCCTGCCGCAACTTCTACCYGGACG |
| | (p.Leu260Pro) | | | GCAGGTGTGTGGAGACCTGC′] |
| 1542 | NM_000208.2(INSR): c.164T > C | 3643 | INSR | [′TTGCATGAGCTGGAGAATTGCTCTGYCATCG |
| | (p.Val55Ala) | | | AAGGACACTTGCAGATACTC′] |
| 1543 | NM_002198.2(IRF1): c.31T > C | 3659 | IRF1 | [′CATCACTCGGATGCGCATGAGACCCYGGCT |
| | (p.Trp11Arg) | | | AGAGATGCAGATTAATTCCAA′] |
| 1544 | NM_000213.3(ITGB4): c.467T > | 3691 | ITGB4 | [′AACCTCAAGAAGATGGGGCAGAACCYGGGT |
| | C (p.Leu156Pro) | | | ACGGCAGGGCCAGAGTGGAGG′] |
| 1545 | NM_000213.3(ITGB4): c.1684T > | 3691 | ITGB4 | [′CCGAGGACGCTGCTCCATGGGCCAGYGTGT |
| | C (p.Cys562Arg) | | | GTGTGAGCCTGGTTGGACAGG′] |
| 1546 | NM_000213.3 (ITGB4): c.112T > | 3691 | ITGB4 | [′CTGCAAGAAGGCCCCAGTGAAGAGCYGCAC |
| | C (p.Cys38Arg) | | | GGAGTGTGTCCGTGTGGATAA′] |
| 1547 | NM_000454.4(SOD1): c.338T > C | 6647 | SOD1 | [′ATCTCACTCTCAGGAGACCATTGCAYCATTG |
| | (p.Ile113Thr) | | | GCCGCACACTGGTGGTAAGT′] |
| 1548 | NM_000454.4(SOD1): c.434T > C | 6647 | SOD1 | [′AAGACAGGAAACGCTGGAAGTCGTTYGGCT |
| | (p.Leu145Ser) | | | TGTGGTGTAATTGGGATCGCC′] |
| 1549 | NM_000454.4(SOD1): c.455T > C | 6647 | SOD1 | [′CGTTTGGCTTGTGGTGTAATTGGGAYCGCCC |
| | (p.Ile152Thr) | | | AATAAACATTCCCTTGGATG′] |
| 1550 | NM_001025107.2(ADAR): c.1883T > | 103 | ADAR | [′ACCAGACTTTCTTTTTGTAGGTTTCYCTACA |
| | C (p.Leu628Pro) | | | GTGAGTTAATGAAATACAAC′] |
| 1551 | NM_001025107.2(ADAR): c.2609T > | 103 | ADAR | [′TCCAAAAAGAACATTTTTCTTCTATYTAAGA |
| | C (p.Phe870Ser) | | | AGCTCTGCTCCTTCCGTTAC′] |
| 1552 | NM_002185.3(IL7R): c.197T > C | 3575 | UL7R | [′CCATATTTCAAATTCCAGATTGGTGRTGTTG |
| | (p.Ile66Thr) | | | ACATCTGGGTCCTCAAAAGC′] |
| 1553 | NM_033500.2(HK1): c.1550T > C | 3098 | HK1 | [′ACTGCAACAGAGAATGGTGACTTCTYGGCC |
| | (p.Leu517Ser) | | | CTGGATCTTGGAGGAACCAAT′] |
| 1554 | NM_000184.2(HB G2): c.- | 3048 | HBG2 | [′CTTCCCCACACTATCTCAATGCAAAYATCTG |
| | 228T > C | | | TCTGAAACGGTCCCTGGCTA′] |
| 1555 | NM_000184.2(HB G2): c.125T > C | 3048 | HBG2 | [′GTTGTCTACCCATGGACCCAGAGGTYCTTTG |
| | (p.Phe42Ser) | | | ACAGCTTTGGCAACCTGTCC′] |
| 1556 | NM_000559.2(HB G1): c.- | 3047 | HBG1 | [′TAGCAGTATCCTCTTGGGGGCCCCTYCCCCA |
| | 251T > C | | | CACTATCTCAATGCAAATAT′] |
| 1557 | NM_000519.3(HBD): c.-127T > C | 3045 | HBD | [′TCTCACAAACTAATGAAACCCTGCTYATCTT |
| | | | | AAACCAACCTGCTCACTGGA′] |
| 1558 | NM_000518.4(HBB): c.257T > C | 3043 | HBB | [′CACCTGGACAACCTCAAGGGCACCTYTGCC |
| | (p.Phe86Ser) | | | ACACTGAGTGAGCTGCACTGT′] |
| 1559 | NM_000518.4(HBB): c.128T > C | 3043 | HBB | [′GTCTACCCTTGGACCCAGAGGTTCTBTGAGT |
| | (p.Phe43Ser) | | | CCTTTGGGGATCTGTCCACT′] |
| 1560 | NM_000518.4(HBB): c.337T > C | 3043 | HBB | [′ACAGCTCCTGGGCAACGTGCTGGTCYGTGTG |
| | (p.Cys113Arg) | | | CTGGCCCATCACTTTGGCAA′] |
| 1561 | NM_000518.4(HBB): c.127T > C | 3043 | HBB | [′GGTCTACCCTTGGACCCAGAGGTTCBTTGAG |
| | (p.Phe43Leu) | | | TCCTTTGGGGATCTGTCCAC′] |
| 1562 | NM_000518.4(HBB): c.332T > C | 3043 | HBB | [′CTCCCACAGCTCCTGGGCAACGTGCYGGTCT |
| | (pLeu111Pro) | | | GTGTGCTGGCCCATCACTTT′] |
| 1563 | NM_000518.4(HBB): c.92 + 6T > C | 3043 | HBB | [′GGTGGTGAGGCCCTGGGCAGGTTGGHATCA |
| | | | | AGGTTACAAGACAGGTTTAAG′] |
| 1564 | NM_000518.4(HBB): c.344T > C | 3043 | HBB | [′CTGGGCAACGTGCTGGTCTGTGTGCYGGCCC |
| | (p.Leu115Pro) | | | ATCACTTTGGCAAAGAATTC′] |
| 1565 | NM_000517.4(HBA2): c.427T > C | 3040 | HBA2 | [′CACCGTGCTGACCTCCAAATACCGTNAAGCT |
| | (p.Ter143Gln) | | | GGAGCCTCGGTAGCCGTTCC′] |
| 1566 | NM_000517.4(HBA2): c.2T > C | 3040 | HBA2 | [′CCACAGACTCAGAGAGAACCCACCAYGGTG |
| | (p.Met1Thr) | | | CTGTCTCCTGCCGACAAGACC′] |
| 1567 | NM_000517.4(HBA2): c.89T > C | 3040 | HBA2 | [′GCTGGCGAGTATGGTGCGGAGGCCCYGGAG |
| | (p.Leu30Pro) | | | AGGTGAGGCTCCCTCCCCTGC′] |
| 1568 | NM_006121.3(KRT1): c.482T > C | 3848 | KRT1 | [′CAAGAAGTCACTATCAACCAGAGCCYTCTTC |
| | (p.Leu161Pro) | | | AGCCCCTCAATGTGGAGATT′] |
| 1569 | NM_006121.3(KRT1): c.1436T > | 3848 | KRT1 | [′ACCAAGCTGGCCCTGGATCTGGAGAYTGCC |
| | C (p.Ile479Thr) | | | ACCTACAGGACCCTCCTGGAG′] |
| 1570 | NM_006121.3(KRT1): c.1424T > | 3848 | KRT1 | [′GAGCTGATGAACACCAAGCTGGCCCYGGAT |
| | C (p.Leu475Pro) | | | CTGGAGATTGCCACCTACAGG′] |
| 1571 | NM_001077488.3(GNAS): c.299T > | 2778 | GNAS | [′AAAGTGCAGGACATCAAAAACAACCYGAAA |
| | C (p.Leu100Pro) | | | GAGGCGATTGAAGTACGTGCT′] |
| 1572 | NM_000515.4(GH1): c.291 + 6T > | 2688 | GH1 | [′AGGAAACACAACAGAAATCCGTGAGYGGAT |
| | C | | | GCCTTCTCCCCAGGCGGGGAT′] |
| 1573 | NM_002087.3(GRN): c.2T > C | 2896 | GRN | [′TCCTTGGTACTTTGCAGGCAGACCAYGTGGA |
| | (p.Met1Thr) | | | CCCTGGTGAGCTGGGTGGCC′] |
| 1574 | NM_021957.3(GYS2): c.1447T > | 2998 | GYS2 | [′GGTGATTTTGCACCCAGAGTTTCTAYCCTCC |
| | C (p.Ser483Pro) | | | ACCAGTCCCTTACTACCCAT′] |
| 1575 | NM_001083112.2(GPD2): c.1904T > | 2820 | GPD2 | [′AGGTATAAGAAGAGATTTCATAAGTYTGAT |
| | C (p.Phe635Ser) | | | GCAGACCAGAAAGGCTTTATT′] |
| 1576 | NM_000340.1(SLC2A2): c.1166T > | 6514 | SLC2A2 | [′ATCTTCATGTCAGTGGGACTTGTGCBGCTGG |
| | C (p.Leu389Pro) | | | TAAGTTTGGTGCCTGCACTG′] |
| 1577 | NM_005271.3(GLUD1): c.1501T > | 2746 | GLUD1 | [′GTGTTCTTTTCCCTAATAGGGTGCAYCTGAG |
| | C (p.Ser501Pro) | | | AAAGACATCGTGCACTCTGG′] |
| 1578 | NM_000162.3(GCK): c.391T > C | 2645 | GCK | [′CTTCGACTACATCTCTGAGTGCATCYCCGAC |
| | (p.Ser131Pro) | | | TTCCTGGACAAGCATCAGAT′] |
| 1579 | NM_001018077.1(NR3C1): c.1712T > | 2908 | NR3C1 | [′CTCAACATGTTAGGAGGGCGGCAAGYGATT |
| | C (p.Val571Ala) | | | GCAGCAGTGAAATGGGCAAAG′] |
| 1580 | NM_001018077.1(NR3C1): c.2318T > | 2908 | NR3C1 | [′TCAAATGGAAATATCAAAAAACTTCYGTTTC |
| | C (p.Leu773Pro) | | | ATCAAAAGTGACTGCCTTAA′] |
| 1581 | NM_001018077.1(NR3C1): c.2209T > | 2908 | NR3C1 | [′GGTTGAAAATCTCCTTAACTATTGCYTCCAA |
| | C (p.Phe737Leu) | | | ACATTTTTGGATAAGACCAT′] |
| 1582 | NM_002055.4(GFAP): c.1055T > | 2670 | GFAP | [′CGCCACTTGCAGGAGTACCAGGACCYGCTC |
| | C (p.Leu352Pro) | | | AATGTCAAGCTGGCCCTGGAC′] |
| 1583 | NM_002353.2(TACSTD2): c.557T > | 4070 | TACSTD2 | [′CGGCTCTTCCGCGAGCGCTATCGGCYGCACC |
| | C (p.Leu186Pro) | | | CCAAGTTCGTGGCGGCCGTG′] |
| 1584 | NM_000821.6(GGCX): c.896T > | 2677 | GGCX | [′TTTCTCCCTGCTTTCCTAGGTATGTYCTCCTA |
| | C (p.Phe299Ser) | | | CGTCATGCTGGCCAGCAGC′] |
| 1585 | NM_000145.3(FSHR): c.479T > C | 2492 | FSHR | [′CAAGATAACATAAACATCCACACAAYTGAA |
| | (p.Ile160Thr) | | | AGAAATTCTTTCGTGGGGCTG′] |
| 1586 | NM_000145.3(FSHR): c.1634T > | 2492 | FSHR | [′CTCAATGTCCTGGCCTTTGTGGTCAYCTGTG |
| | C (p.Ile545Thr) | | | GCTGCTATATCCACATCTAC′] |
| 1587 | NM_182925.4(FLT4): c.3131T > C | 2324 | FLT4 | [′AGAGACCTGGCTGCTCGGAACATTCYGCTGT |
| | (p.Leu1044Pro) | | | CGGAAAGCGACGTGGTGAAG′] |
| 1588 | NM_182925.4(FLT4): c.3257T > C | 2324 | FLT4 | [′CTGAAGTGGATGGCCCCTGAAAGCAYCTTC |
| | (p.Ile1086Thr) | | | GACAAGGTGTACACCACGCAG′] |
| 1589 | NM_023110.2(FGFR1): c.899T > | 2260 | FGFR1 | [′CACATCGAGGTGAATGGGAGCAAGAYTGGC |
| | C (p.Ile300Thr) | | | CCAGACAACCTGCCTTATGTC′] |
| 1590 | NM_023110.2(FGFR1): c.1141T > | 2260 | FGFR1 | [′CCTGTACCTGGAGATCATCATCTATYGCACA |
| | C (p.Cys381Arg) | | | GGGGCCTTCCTCATCTCCTG′] |
| 1591 | NM_000138.4(FBN1): c.4987T > | 2200 | FBN1 | [′TCCTGGAATCTGTGGTCCAGGGACAYGTTAC |
| | C (p.Cys1663Arg) | | | AACACCGTTGGCAACTACAC′] |
| 1592 | NM_000138.4(FBN1): c.3220T > | 2200 | FBN1 | [′CTGTTTTTGTGCAGACATTGACGAAYGCCGC |
| | C (p.Cys1074Arg) | | | ATATCTCCTGACCTCTGTGG′] |
| 1593 | NM_000138.4(FBN1): c.3793T > | 2200 | FBN1 | [′TATCCCTGGAGAGTACAGGTGCTTGYGTTAT |
| | C (p.Cys1265Arg) | | | GATGGATTCATGGCATCTGA′] |
| 1594 | NM_000043.4(FAS): c.532T > C | 355 | FAS | [′ATCCAGATCTAACTTGGGGTGGCTTYGTCTT |
| | (p.Cys178Arg) | | | CTTCTTTTGCCAATTCCACT′] |
| 1595 | NM_000043.4(FAS): c.651 + 2T > | 355 | FAS | [′CATGAATCTCCAACTTTAAATCCTGHAGGTA |
| | C | | | TTGAAATAGGTATCAGCTTT′] |
| 1596 | NM_000129.3(F13A1): c.728T > C | 2162 | F13A1 | [′ATCCTGGACACTTGCCTGTATGTGAYGGACA |
| | (p.Met243Thr) | | | GAGCACAAATGGACCTCTCT′] |
| 1597 | NM_000186.3(CFH): c.1606T > C | 3075 | CFH | [′GCTGAATGACACATTGGACTATGAAYGCCA |
| | (p.Cys536Arg) | | | TGATGGTTATGAAAGCAATAC′] |
| 1598 | NM_000123.3(ERCC5): c.2573T > | −1 | — | [′AAGTTAATAAATTTGGCTTATTTGCYTGGAA |
| | C (p.Leu858Pro) | | | GTGATTATACCGAAGGAATA′] |
| 1599 | NM_000122.1(ERCC3): c.296T > | 2071 | ERCC3 | [′CCAGTTTACAAATATGCCCAAGACTYCTTGG |
| | C (p.Phe99Ser) | | | TGGCTATTGCAGAGCCAGTG′] |
| 1600 | NM_001113755.2(TYMP): c.854T > | 1890 | TYMP | [′CTGGGTCGCTGCGTGGGCCACGCCCYGGAG |
| | C (p.Leu285Pro) | | | GTGGAGGAGGCGCTGCTCTGC′] |
| 1601 | NM_000118.3(ENG): c.2T > C | 2022 | ENG | [′CGCACAGGCCCCCACGTGGACAGCAYGGAC |
| | (p.Met1Thr) | | | CGCGGCACGCTCCCTCTGGCT′] |
| 1602 | NM_203342.2(EPB41): c.2T > C | 2035 | EPB41 | [′AAACCAATCAGAAAACACAGGAACABGCAC |
| | (p.Met1Thr) | | | TGCAAGGTTTCTTTGTTGGAT′] |
| 1603 | NM_001972.2(ELANE): c.211T > | 1991 | ELANE | [′CAACTTCGTCATGTCGGCCGCGCACYGCGTG |
| | C (p.Cys71Arg) | | | GCGAATGTGTGAGTAGCCGG′] |
| 1604 | NM_000400.3(ERCC2): c.1454T > | 2068 | ERCC2 | [′ACCATGGCAACCTTCACCATGACGCYGGCA |
| | C (p.Leu485Pro) | | | CGGGTCTGCCTCTGCCCTATG′] |
| 1605 | NM_000281.3(PCBD1): c.244T > | 5092 | PCBD1 | [′CCACATCACGCTGAGCACCCATGAGYGTGC |
| | C (p.Cys82Arg) | | | CGGCCTTTCAGAACGGGACAT′] |
| 1606 | NM_001927.3(DES): c.1034T > C | 1674 | DES | [′CCCCCTCTCCTGCAGAACGATTCCCYGATGA |
| | (p.Leu345Pro) | | | GGCAGATGCGGGAATTGGAG′] |
| 1607 | NM_001927.3(DES): c.1154T > C | 1674 | DES | [′CTCAAGGATGAGATGGCCCGCCATCYGCGC |
| | (p.Leu385Pro) | | | GAGTACCAGGACCTGCTCAAC′] |
| 1608 | NM_000498.3(CYP11B2): c.1157T > | −1 | — | [′GTTCTGAAGCACCAAGTCTGAGCTCRCCACT |
| | C (p.Val386Ala) | | | CGCTCCAAAAACAGACCCAC′] |
| 1609 | NM_000498.3(CYP11B2): c.1382T > | −1 | — | [′CGGCGCCTGGCAGAGGCAGAGATGCYGCTG |
| | C (p.Leu461Pro) | | | CTGCTGCACCACGTAAGCAGG′] |
| 1610 | NM_001886.2(CRYBA4): c.281T > | 1413 | CRYBA4 | [′TACCCCGCCGAGAGGCTCACCTCCTYCCGGC |
| | C (p.Phe94Ser) | | | CTGCGGCCTGTGCTGTAAGT′] |
| 1611 | NM_001886.2(CRYBA4): c.206T > | 1413 | CRYBA4 | [′GGCTTCCAAGGGCAGCAGTACATTCYGGAA |
| | C (p.Leu69Pro) | | | CGAGGCGAATATCCAAGCTGG′] |
| 1612 | NM_000762.5(CYP2A6): c.670T > | −1 | — | [′GCAACCCCAGCTCTATGAGATGTTCYCTTCG |
| | C (p.Ser224Pro) | | | GTGATGAAACACCTGCCAGG′] |
| 1613 | NM_000165.4(GJA1): c.52T > C | 2697 | GJA1 | [′ACTCCTTGACAAGGTTCAAGCCTACYCAACT |
| | (p.Ser18Pro) | | | GCTGGAGGGAAGGTGTGGCT′] |
| 1614 | NM_000165.4(GJA1): c.32T > C | 2697 | GJA1 | [′GACTGGAGCGCCTTAGGCAAACTCCYTGAC |
| | (p.Leu11Pro) | | | AAGGTTCAAGCCTACTCAACT′] |
| 1615 | NM_004004.5(GJB2): c.101T > C | 2706 | GJB2 | [′CTCCTTTGCAGCCACAACGAGGATCVTAATG |
| | (p.Met34Thr) | | | CGAAAAATGAAGAGGACGGT′] |
| 1616 | NM_004004.5(GJB2): c.229T > C | 2706 | GJB2 | [′CTTCCCCATCTCCCACATCCGGCTAYGGGCC |
| | (p.Trp77Arg) | | | CTGCAGCTGATCTTCGTGTC′] |
| 1617 | NM_004004.5(GJB2): c.269T > C | 2706 | GJB2 | [′ATCTTCGTGTCCACGCCAGCGCTCCYAGTGG |
| | (p.Leu90Pro) | | | CCATGCACGTGGCCTACCGG′] |
| 1618 | NM_005215.3(DCC): c.503T > C | 1630 | DCC | [′AAGTGTGAAGTCATTGGGGAGCCCAYGCCA |
| | (p.Met168Thr) | | | ACAATCCACTGGCAGAAGAAC′] |
| 1619 | NM_001849.3(COL6A2): c.2329T > | 1292 | COL6A2 | [′GAGTGAAAACCTCTACTCCATCGCCYGCGA |
| | C (p.Cys777Arg) | | | CAAGCCACAGCAGGTGCGCAA′] |
| 1620 | NM_000090.3(COL3A1): c.582 + | 1281 | COL3A1 | [′CTGGTCATCCTGGTTCCCCTGTAAGHATAGC |
| | 6T > C | | | CATTGGTGGTGTTTTCTTCC′] |
| 1621 | NM_000089.3(COL1A2): c.279 + | 1278 | COL1A2 | [′GTTGGACTTGGCCCTGGACCAATGGYATGCT |
| | 2T > C | | | TATCTGTTTATCTTAGCCAA′] |
| 1622 | NM_000089.3(COL1A2): c.3105 + | 1278 | COL1A2 | [′TTGCAAGGTCTGCCTGGTATCGCTGYAAGTA |
| | 2T > C | | | AACTGTAGCCATCTCGCACA′] |
| 1623 | NM_000088.3(COL1A1): c.4391T > | 1277 | COL1A1 | [′TTCGACGTTGGCCCTGTCTGCTTCCYGTAAA |
| | C (p.Leu1464Pro) | | | CTCCCTCCATCCCAACCTGG′] |
| 1624 | NM_000493.3 (COL10A1): c.1841T > | −1 | — | [′AAAGGGACTCATGTTTGGGTAGGCCYGTAT |
| | C (p.Leu614Pro) | | | AAGAATGGCACCCCTGTAATG′] |
| 1625 | NM_000493.3(COL10A1): c.1771T > | −1 | — | [′TGACCCAAGGACTGGAATCTTTACTYGTCAG |
| | C (p.Cys591Arg) | | | ATACCAGGAATATACTATTT′] |
| 1626 | NM_000493.3(COL10A1): c.1951T > | −1 | — | [′CGATCTCACAGAAAATGACCAGGTGYGGCT |
| | C (p.Trp651Arg) | | | CCAGCTTCCCAATGCCGAGTC′] |
| 1627 | NM_000493.3(COL10A1): c.2011T > | −1 | — | [′ATACTCCTCTGAGTATGTCCACTCCYCTTTCT |
| | C (p.Ser671Pro) | | | CAGGATTCCTAGTGGCTCC′] |
| 1628 | NM_000493.3(COL10A1): c.1798T > | −1 | — | [TCAGATACCAGGAATATACTATTTTYCATAC |
| | C (p.Ser600Pro) | | | CACGTGCATGTGAAAGGGAC′] |
| 1629 | NM_020549.4(CHAT): c.629T > C | 1103 | CHAT | [′ATGTATCTCAACAACCGCCTGGCCCYGCCTG |
| | (p.Leu210Pro) | | | TCAACTCCAGCCCTGCCGTG′] |
| 1630 | NM_020549.4(CHAT): c.914T > C | 1103 | CHAT | [′ATCATGCCGGAGCCTGAGCACGTCABCGTA |
| | (p.Ile305Thr) | | | GCCTGCTGCAATCAGGTAAGC′] |
| 1631 | NM_020549.4(CHAT): c.1007T > | 1103 | CHAT | [′GATCTGTTCACTCAGTTGAGAAAGAYAGTC |
| | C (p.Ile336Thr) | | | AAAATGGCTTCCAACGAGGAC′] |
| 1632 | NM_001822.5(CHN1): c.427T > C | 1123 | CHN1 | [′TGCCAAGATGACGATAAACCCAATTYATGA |
| | (p.Tyr143His) | | | GCACGTAGGATACACAACCTT′] |
| 1633 | NM_001904.3(CTNNB1): c.133T > | 1499 | CTNNB1 | [′TTCTGGTGCCACTACCACAGCTCCTBCTCTG |
| | C (p.Ser45Pro) | | | AGTGGTAAAGGCAATCCTGA′] |
| 1634 | NM_004056.4(CA8): c.298T > C | 767 | CA8 | [′ACATATATTTTCTTTTTCAGTTCTTYCGGGAG |
| | (p.Ser100Pro) | | | GACCATTGCCTCAAGGGCA′] |
| 1635 | NM_016124.4(RHD): c.329T > C | 6007 | RHD | [′CCTTCTGGGAAGGTGGTCATCACACYGTTCA |
| | (p.Leu110Pro) | | | GGTATTGGGATGGTGGCTGG′] |
| 1636 | NM_015865.6(SLC14A1): c.871T > | 6563 | SLC14A1 | [′CTTTGGACTCTGGGGTTTCAACAGCYCTCTG |
| | C (p.Ser291Pro) | | | GCCTGCATTGCAATGGGAGG′] |
| 1637 | NM_001250.5(CD40): c.247T > C | 958 | CD40 | [′GACACACTGCCACCAGCACAAATACYGCGA |
| | (p.Cys83Arg) | | | CCCCAGTGCGTGCGCTGTTGG′] |
| 1638 | NM_000342.3(SLC4A1): c.2317T > | 6521 | SLC4A1 | [′AGTGTGCGGCTCCCCCACAGGCCTGYCCATC |
| | C (p.Ser773Pro) | | | CTCATGGAGCCCATCCTGTC′] |
| 1639 | NM_001681.3(ATP2A2): c.1678T > | 488 | ATP2A2 | [′GGGTAGTGGCAGCGACACACTGCGAYGCCT |
| | C (p.Cys560Arg) | | | GGCCCTGGCCACTCATGACAA′] |
| 1640 | NM_001082971.1(DDC): c.925T > | 1644 | DDC | [TCCCCACAAATGGCTATTGGTGAATYTTGAC |
| | C (p.Phe309Leu) | | | TGTTCTGCCATGTGGTAAGT′] |
| 1641 | NM_031226.2(CYP19A1): c.743 + | −1 | — | [′ATACAAAAAGTATGAGAAGTCTGTGYAAGT |
| | 2T > C | | | AATACAACTTTGGAAGATTTA′] |
| 1642 | NM_000486.5(AQP2): c.646T > C | −1 | — | [′ACCCCTGGTGGGCGCCATCCTGGGCYCCCTC |
| | (p.Ser216Pro) | | | CTCTACAACTACGTGCTGTT′] |
| 1643 | NM_000041.3(APOE): c.388T > C | 348 | APOE | [′GCTGGGCGCGGACATGGAGGACGTGYGCGG |
| | (p.Cys130Arg) | | | CCGCCTGGTGCAGTACCGCGG′] |
| 1644 | NM_000041.3(APOE): c.137T > C | 348 | APOE | [′TGGCAGAGCGGCCAGCGCTGGGAACYGGCA |
| | (p.Leu46Pro) | | | CTGGGTCGCTTTTGGGATTAC′] |
| 1645 | NM_000039.1(APOA1): c.220T > | −1 | — | [′CTCCAGCCTAAAGCTCCTTGACAACYGGGA |
| | C (p.Trp74Arg) | | | CAGCGTGACCTCCACCTTCAG′] |
| 1646 | NM_000039.1(APOA1): c.341T > | −1 | — | [′CTGAGGCAGGAGATGAGCAAGGATCYGGAG |
| | C (p.Leu114Pro) | | | GAGGTGAAGGCCAAGGTGCAG′] |
| 1647 | NM_000039.1(APOA1): c.593T > | 335 | APOA1 | [′TACAGCGACGAGCTGCGCCAGCGCTYGGCC |
| | C (p.Leu198Ser) | | | GCGCGCCTTGAGGCTCTCAAG′] |
| 1648 | NM_000416.2(IFNGR1): c.260T > | 3459 | IFNGR1 | [′AATATTTCTCATCATTATTGTAATAYTTCTG |
| | C (p.Ile87Thr) | | | ATCATGTTGGTGATCCATCA′] |
| 1649 | NM_000488.3(SERPINC1): c.1141T > | 462 | SERPINC1 | [′TGTCGATCTGTTCAGCCCTGAAAAGYCCAAA |
| | C (p.Ser381Pro) | | | CTCCCAGGTTTGTCTAGGAA′] |
| 1650 | NM_000488.3(SERPINC1): c.442T > | 462 | SERPINC1 | [′GTTTGACACCATATCTGAGAAAACAYCTGAT |
| | C (p.Ser148Pro) | | | CAGATCCACTTCTTCTTTGC′] |
| 1651 | NM_000488.3(SERPINC1): c.68T > | 462 | SERPINC1 | [′AAGGTTTATCTTTTGTCCTTGCTGCYCATTG |
| | C (p.Leu23Pro) | | | GCTTCTGGGACTGCGTGACC′] |
| 1652 | NM_000488.3(SERPINC1): c.667T > | 462 | SERPINC1 | [′CAGAGCGGCCATCAACAAATGGGTGYCCAA |
| | C (p.Ser223Pro) | | | TAAGACCGAAGGCCGAATCAC′] |
| 1653 | NM_000488.3(SERPINC1): c.379T > | 462 | SERPINC1 | [′TTTTGCTATGACCAAGCTGGGTGCCYGTAAT |
| | C (p.Cys127Arg) | | | GACACCCTCCAGCAACTGAT′] |
| 1654 | NM_001085.4(SERPINA3): c.233T > | 12 | SERPINA3 | [′GATAAGAATGTCATCTTCTCCCCACYGAGCA |
| | C (p.Leu78Pro) | | | TCTCCACCGCCTTGGCCTTC′] |
| 1655 | NM_000341.3(SLC3A1): c.1400T > | 6519 | SLC3A1 | [′AATCAGTATGTCAACGTGATGAACAHGCTTC |
| | C (p.Met467Thr) | | | TTTTCACACTCCCTGGAACT′] |
| 1656 | NM_000341.3(SLC3A1): c.2033T > | −1 | — | [′AATCGAGCATGCTATTCCAGTGTACYGAAC |
| | C (p.Leu678Pro) | | | ATACTGTATACCTCGTGTTAG′] |
| 1657 | NM_000021.3(PSEN1): c.749T > | 5663 | PSEN1 | [′CCTGAATGGACTGCGTGGCTCATCTYGGCTG |
| | C (p.Leu250Ser) | | | TGATTTCAGTATATGGTAAA′] |
| 1658 | NM_000021.3(PSEN1): c.338T > | 5663 | PSEN1 | [′TTTTATACCCGGAAGGATGGGCAGCYGTAC |
| | C (p.Leu113Pro) | | | GTATGAGTTTTGTTTTATTAT′] |
| 1659 | NM_000021.3(PSEN1): c.497T > | 5663 | PSEN1 | [′CTTTTCTAGGTCATCCATGCCTGGCBTATTAT |
| | C (p.Leu166Pro) | | | ATCATCTCTATTGTTGCTG′] |
| 1660 | NM_000021.3(PSEN1): c.254T > | 5663 | PSEN1 | [′TATGGCGCCAAGCATGTGATCATGCYCTTTG |
| | C (p.Leu85Pro) | | | TCCCTGTGACTCTCTGCATG′] |
| 1661 | NM_001151.3(SLC25A4): c.293T > | 291 | SLC25A4 | [′GCCTTCAAGGACAAGTACAAGCAGCYCTTC |
| | T > C (p.Leu98Pro) | | | TTAGGGGGTGTGGATCGGCAT′] |
| 1662 | NM_001100.3(ACTA1): c.287T > | 58 | ACTA1 | [′TGGCACCACACCTTCTACAACGAGCYTCGCG |
| | C (p.Leu96Pro) | | | TGGCTCCCGAGGAGCACCCC′] |
| 1663 | NM_001100.3(ACTA1): c.668T > | 58 | ACTA1 | [′AAGGAGAAGCTGTGCTACGTGGCCCYGGAC |
| | C (p.Leu223Pro) | | | TTCGAGAACGAGATGGCGACG′] |
| 1664 | NM_000485.2(APRT): c.407T > C | 353 | APRT | [′CTCACCCTCCCATCCCCAGGAACCAYGAAC |
| | (p.Met136Thr) | | | GCTGCCTGTGAGCTGCTGGGC′] |
| 1665 | NM_000485.2(APRT): c.329T > C | 353 | APRT | [′CACCACTTCCCACTCCAGGCTGAGCYGGAG |
| | (p.Leu110Pro) | | | ATTCAGAAAGACGCCCTGGAG′] |
| 1666 | NM_001614.3(ACTG1): c.1109T > | 71 | ACTG1 | [′TACGACGAGTCGGGCCCCTCCATCGYCCACC |
| | C (p.Val370Ala) | | | GCAAATGCTTCTAAACGGAC′] |
| 1667 | NM_000751.2(CHRND): c.283T > | 1144 | CHRND | [′CCGGCTGAAGTGGAATGCTGAAGAAYTTGG |
| | C (p.Phe95Leu) | | | AAACATCAGTGTCCTGCGCCT′] |
| 1668 | NM_000751.2(CHRND): c.188T > | 1144 | CHRND | [′GCCCTGGCCCTCACACTCTCCAACCYCATCT |
| | C (p.Leu63Pro) | | | CCCTGGTGAGAGGCCCTCCG′] |
| 1669 | NM_001039523.2(CHRNA1): c. | 1134 | CHRNA1 | [′CTCTGTCTTACTGTCTTTGACTGTGYTCCTTC |
| | 901T > C (p.Phe301Leu) | | | TGGTCATCGTGGAGCTGAT′] |
| 1670 | NM_001004127.2(AL G11): c.257T > | 440138 | ALG11 | [′GGAGAAAGAGTTTTATGGTGTGCTTYAAGA |
| | C (p.Leu86Ser) | | | GCCCTGCAGAAAAAGTAGGTA′] |
| 1671 | NM_002036.3(ACKR1): c.- | 2532 | ACKR1 | [′AGAGGGAGCTAGGAGGCTAGCATAGRAAGG |
| - | 67T > C | | | AGARAAGGAAAAAGACTTTGA′, |
| 1674 | | | | ′TATAAAGACTGAGGGGCAAACAGCASGGGA |
| | | | | AATGAGGGGCATAGGGATAAG′, |
| | | | | ′CGCAGACAGAAGGGCTGGGACGGCTRTCAG |
| | | | | CGCCTGTGCTTCCAAGRTAAG′, |
| | | | | ′ATCAGGAAGCCTTACCCCACGCCCAYTGCCT |
| | | | | GCACAAGCCTCAGGCCTATG′] |
| 1675 | NM_014053.3(FLVCR1): c.574T > | 28982 | FLVCR1 | [′CAACTGCCTGGGTGCCTGGATCAAGYGCGG |
| | C (p.Cys192Arg) | | | CAGTGTGCAGCAGCATCTCTT′] |
| 1676 | NM_004268.4(MED17): c.1112T > | 9440 | MED17 | [′TGTCCGGAGGACCACCTTTATGTCCYAGAGC |
| | C (p.Leu371Pro) | | | ATAATTTGCATCTACTGATT′] |
| 1677 | NM_024411.4(PDYN): c.632T > C | 5173 | PDYN | [′CTGTACAAACGCTATGGGGGCTTCTYGCGGC |
| | (p.Leu211Ser) | | | GCATTCGTCCCAAGCTCAAG′] |
| 1678 | NM_000018.3(ACADVL): c.848T > | 37 | ACADVL | [′GTGAAGGAGAAGATCACAGCTTTTGYGGTG |
| | C (p.Val283Ala) | | | GAGAGGGGCTTCGGGGGCATT′] |
| 1679 | NM_000021.3(PSEN1): c.1175T > | 5663 | PSEN1 | [′GGAGATTTCATTTTCTACAGTGTTCYGGTTG |
| | C (p.Leu392Pro) | | | GTAAAGCCTCAGCAACAGCC′] |
| 1680 | NM_000083.2(CLCN1): c.857T > | 1180 | CLCN1 | [′CCACACTTCTGTGCCCCTGCAGGAGYGCTAT |
| | C (p.Val286Ala) | | | TTAGCATCGAGGTCACCTCC′] |
| 1681 | NM_000083.2(CLCN1): c.920T > | 1180 | CLCN1 | [′GTTCGGAACTACTGGAGAGGATTCTYTGCA |
| | C (p.Phe307Ser) | | | GCCACGTTCAGCGCCTTTGTG′] |
| 1682 | NM_000157.3(GBA): c.703T > C | 2629 | GBA | [′CAATGGAGCGGTGAATGGGAAGGGGYCACT |
| | (p.Ser235Pro) | | | CAAGGGACAGCCCGGAGACAT′] |
| 1683 | NM_000166.5(GJB1): c.145T > C | 2705 | GJB1 | [′AGAGAGTGTGTGGGGTGATGAGAAAYCTTC |
| | (p.Ser49Pro) | | | CTTCATCTGCAACACACTCCA′] |
| 1684 | NM_000186.3(CFH): c.3590T > C | 3075 | CFH | [′ATATCCCCGTTTACACACAAATTCARCTGAT |
| - | (p.Val1197Ala) | | | TCACCTGTTCTCGAATAAAG′, |
| 1686 | | | | ′GAACTTATCATTGCTGCTTTTGATTaagatat |
| | | | | tggtcaaagagtacaaact′, |
| | | | | ′ttcagctataatatgaataagaacttggaatc |
| | | | | aaacatagagatctagtga] |
| 1687 | NM_000195.4(HPS1): c.2003T > | 3257 | HPS1 | [′GGGGATGACAGACAGGTGCAGGGCCRGCAG |
| | C (p.Leu668Pro) | | | CTCGTAGCACCTGACAGCCTC′] |
| 1688 | NM_000195.4(HPS1): c.716T > C | 3257 | HPS1 | [′GCTGGGGTAGAGGTCCTGAACCAGGRGGAT |
| | (p.Leu239Pro) | | | GAGGGCAAGCAGGTCGGCCGG′] |
| 1689 | NM_000334.4(SCN4A): c.4468T > | 6329 | SCN4A | [′CCTCTTCAACATCGGCCTCCTCCTCYTCCTG |
| | C (p.Phe1490Leu) | | | GTCATGTTCATCTACTCCAT′] |
| 1690 | NM_000352.4(ABCC8): c.257T > | 6833 | ABCC8 | [′ACCTTCATGCTGCTCTTCGTCCTGGBGTGTG |
| | C (p.Val86Ala) | | | AGATTGCAGAGGGCATCCTG′] |
| 1691 | NM_000352.4(ABCC8): c.404T > | 6833 | ABCC8 | [′ATCGAGACTTCCAACTTCCCCAAGCYGCTAA |
| | C (p.Leu135Pro) | | | TTGGTAGGTGAGGTGTAGGA′] |
| 1692 | NM_000352.4(ABCC8): c.674T > | 6833 | ABCC8 | [′TTCCTGCAGCCCTTCGTGAATCTGCYGTCCA |
| | C (p.Leu225Pro) | | | AAGGCACCTACTGGTGGATG′] |
| 1693 | NM_000430.3(PAFAH1B1): c.569 − | 5048 | PAFAH1B1 | [′ATTACTTCATAATATATTGCTGTTAYGTGTTT |
| | 10T > C | | | TAGGCCATGACCACAATGT′] |
| 1694 | NM_000525.3(KCNJ11): c.103T > | 3767 | KCNJ11 | [′CCGTGCCCGCCAGCGGAGGGCCCGCBTTGT |
| | C (p.Phe35Leu) | | | GTCCAAGAAAGGCAACTGCAA′] |
| 1695 | NM_000525.3(KCNJ11): c.755T > | 3767 | KCNJ11 | [′GTGGGTGGCAACAGCATCTTCCTGGYGGCC |
| | C (p.Val252Ala) | | | CCGCTGATCATCTACCATGTC′] |
| 1696 | NM_000528.3(MAN2B1): c.2426T > | 4125 | MAN2B1 | [′GGCAGCAGCCTGAGAGATGGCTCGCYGGAG |
| | C (p.Leu809Pro) | | | CTCATGGTGAGTGGGTCAGAG′] |
| 1697 | NM_001034850.2(FAM134B): c. | 54463 | FAM134B | [′GACTTTTCAGCTCTTTGTCCTAAGGYATTTTT |
| | 873 + 2T > C | | | TGTTTAGTTTTCAATTTGT′] |
| 1698 | NM_001457.3(FLNB): c.4804T > | 2317 | FLNB | [′CTACGGGGGTGACGACATCCCACTTYCTCCT |
| | C (p.Ser1602Pro) | | | TATCGCATCCGAGCCACACA′] |
| 1699 | NM_002863.4(PYGL): c.2461T > | 5836 | PYGL | [′CTCCAGTGACCGAACAATTAAAGAAYATGC |
| | C (p.Tyr821His) | | | CCAAAACATCTGGAACGTGGA′] |
| 1700 | NM_003002.3(SDHD): c.284T > C | 6392 | SDHD | [′CCTTGCTCTGCGATGGACTATTCCCYGGCTG |
| | (p.Leu95Pro) | | | CAGCCCTCACTCTTCATGGT′] |
| 1701 | NM_004385.4(VCAN): c.4004 − | 1462 | VCAN | [′TAAGTATTGTGAAAACTCTGTTTTTHTCAGG |
| | 5T > C | | | TCGAATGAGTGATTTGAGTG′] |
| 1702 | NM_004519.3(KCNQ3): c.925T > | 3786 | KCNQ3 | [′TGAGACCTATGCAGATGCCCTGTGGYGGGG |
| | C (p.Trp309Arg) | | | CCTGGTGAGTCACTACCTTGG′] |
| 1703 | NM_004937.2(CTNS): c.473T > C | 1497 | CTNS | [′TCCACCCCCTGCAGTGTCATTGGTCYGAGCT |
| | (p.Leu158Pro) | | | TCGACTTCGTGGCTCTGAAC′] |
| 1704 | NM_006329.3(FBLN5): c.649T > | 10516 | FBLN5 | [′GAACGAGTGTGCCACCGAGAACCCCYGCGT |
| | C (p.Cys217Arg) | | | GCAAACCTGCGTCAACACCTA′] |
| 1705 | NM_006432.3(NPC2): c.295T > C | 10577 | NPC2 | [′TGATGGTTGTAAGAGTGGAATTAACYGCCCT |
| | (p.Cys99Arg) | | | ATCCAAAAAGACAAGACCTA′] |
| 1706 | NM_007375.3(TARDBP): c.*83T > | 23435 | TARDBP | [′CATGGTAAGTATATTGTAAAATACAYATGTA |
| | C | | | CTAAGAATTTTCAAAATTGG′] |
| 1707 | NM_013246.2(CLCF1): c.46T > C | −1 | — | [′CTCGTGGGGGATGTTAGCGTGCCTGYGCAC |
| | (p.Cys16Arg) | | | GGTGCTCTGGCACCTCCCTGC′] |
| 1708 | NM_013246.2(CLCF1): c.676T > | −1 | — | [′CCTGCACCTGGGGGCTCATGGCTTCYGACTT |
| | C (p.Ter226Arg) | | | CTGACCTTCTCCTCTTCGCT′] |
| 1709 | NM_024577.3(SH3TC2): c.1982T > | 79628 | SH3TC2 | [′CTGCCCTTTGCCGAGCGCCTGCAGCYCCTCT |
| | C (p.Leu661Pro) | | | CTGGACACCCTCCTGCCTCT′] |
| 1710 | NM_172107.2(KCNQ2): c.2T > C | 3785 | KCNQ2 | [′CCGGGGCGCCTCCCGCCAGGCACCAYGGTG |
| | (p.Met1Thr) | | | CAGAAGTCGCGCAACGGCGGC′] |
| 1711 | NM_004304.4(ALK): c.3749T > C | 238 | ALK | [′TGCATTTCCTTTCTTCCCAGAGACAYTGCTG |
| | (p.Ile1250Thr) | | | CCAGAAACTGCCTCTTGACC′] |
| 1712 | NM_000495.4(COL4A5): c.4690T > | 1287 | COL4A5 | [′TTCCTTCTCCTTTTCCTTTACCAGAYGTGCAG |
| | C (p.Cys1564Arg) | | | TATGTGAAGCTCCAGCTGT′] |
| 1713 | NM_000495.4(COL4A5): c.4699T > | 1287 | COL4A5 | [′CTTTTCCTTTACCAGATGTGCAGTAYGTGAA |
| | C (p.Cys1567Arg) | | | GCTCCAGCTGTGGTGATCGC′] |
| 1714 | NM_000495.4(COL4A5): c.4756T > | 1287 | COL4A5 | [′CAGTCAGACGATCCAGATTCCCCATYGTCCT |
| | C (p.Cys1586Arg) | | | CAGGGATGGGATTCTCTGTG′] |
| 1715 | NM_000495.4(COL4A5): c.4803 + | 1287 | COL4A5 | [′TAAGAAGCTTAAACTTCAAACAGCTYCTATC |
| | 121T > C | | | CAAGCACTGTGTTCCCCCTC′] |
| 1716 | NM_000495.4(COL4A5): c.5032T > | 1287 | COL4A5 | [′AGACTTGAGGACACGAATTAGCCGAYGTCA |
| | C (p.Cys1678Arg) | | | AGTGTGCATGAAGAGGACATA′] |
| 1717 | NM_005359.5(SMAD4): c.970T > | 4089 | SMAD4 | [′ATTTCCTATAGCTCCTGAGTATTGGYGTTCC |
| | C (p.Cys324Arg) | | | ATTGCTTACTTTGAAATGGA′] |
| 1718 | NM_005359.5(SMAD4): c.1087T > | 4089 | SMAD4 | [′GGACCCTTCTGGAGGAGATCGCTTTYGTTTG |
| | C (p.Cys363Arg) | | | GGTCAACTCTCCAATGTCCA′] |
| 1719 | NM_005359.5(SMAD4): c.1598T > | 4089 | SMAD4 | [′ATTGAAATTCACTTACACCGGGCCCBCCAGC |
| | C (p.Leu533Pro) | | | TCCTAGACGAAGTACTTCAT′] |
| 1720 | NM_020630.4(RET): c.1831T > C | 5979 | RET | [′TAAAGCTGGCTATGGCACCTGCAACNGCTTC |
| | (p.Cys611Arg) | | | CCTGAGGAGGAGAAGTGCTT′] |
| 1721 | NM_020630.4(RET): c.1888T > C | 5979 | RET | [′ACCACCCCCACCCACAGATCCACTGYGCGA |
| | (p.Cys630Arg) | | | CGAGCTGTGCCGCACGGTGAT′] |
| 1722 | NM_000060.3(BTD): c.248T > C | 686 | BTD | [′GCTCTCATCAGCCGCCAAGAGGCCTYGGAG |
| | (p.Leu83Ser) | | | CTCATGAACCAGAACCTTGAC′] |
| 1723 | NM_000060.3(BTD): c.445T > C | 686 | BTD | [′GAACCCATGCCTGGAGCCTCACCGCYTCAAT |
| | (p.Phe149Leu) | | | GACACAGAGGTGATTCCTGC′] |
| 1724 | NM_000060.3(BTD): c.743T > C | 686 | BTD | [′TTTGGCATCTTCACATGCTTTGATAYATTGTT |
| | (p.Ile248Thr) | | | CTTTGACCCTGCCATCAGA′] |
| 1725 | NM_000060.3(BTD): c.764T > C | 686 | BTD | [′GATATATTGTTCTTTGACCCTGCCAYCAGAG |
| | (p.Ile255Thr) | | | TCCTCAGAGACTACAAGGTG′] |
| 1726 | NM_000060.3(BTD): c.833T > C | 686 | BTD | [′ACTGCCTGGATGAACCAGCTCCCACYCTTGG |
| | (p.Leu278Pro) | | | CAGCAATTGAGATTCAGAAA′] |
| 1727 | NM_000060.3(BTD): c.1096T > C | 686 | BTD | [′CCATAGTAAGTTTTTAAAAATTTTGYCAGGC |
| | (p.Ser366Pro) | | | GATCCGTACTGTGAGAAGGA′] |
| 1728 | NM_000060.3(BTD): c.1214T > C | 686 | BTD | [′GAGATGATGTATGACAATTTCACCCYGGTCC |
| | (p.Leu405Pro) | | | CTGTCTGGGGAAAGGAAGGC′] |
| 1729 | NM_000060.3(BTD): c.1252T > C | 686 | BTD | [′GGGAAAGGAAGGCTATCTCCACGTCYGTTC |
| | (p.Cys418Arg) | | | CAATGGCCTCTGCTGTTATTT′] |
| 1730 | NM_000060.3(BTD): c.1267T > C | 686 | BTD | [′TCTCCACGTCTGTTCCAATGGCCTCYGCTGT |
| | (p.Cys423Arg) | | | TATTTACTTTACGAGAGGCC′] |
| 1731 | NM_000060.3(BTD): c.1459T > C | 686 | BTD | [′CACGGGGATATTTGAGTTTCACCTGYGGGGC |
| | (p.Trp487Arg) | | | AACTTCAGTACTTCCTATAT′] |
| 1732 | NM_000155.3(GALT): c.265T > C | 2592 | GALT | [′TCCTTGTCGGTAGGTGAATCCCCAGBACGAT |
| | (p.Tyr89His) | | | AGCACCTTCCTGTTTGACAA′] |
| 1733 | NM_000155.3 (GALT): c.328 + 2T > | 2592 | GALT | [′TGCAGCCTGATGCCCCCAGTCCAGGYAACCT |
| | C | | | GGCTCCAACTGCTGCTGGGG′] |
| 1734 | NM_000155.3(GALT): c.336T > C | 2592 | GALT | [′GATACTCCTTTACCTCAGGACCCAGYGATCA |
| | (p.Ser112=) | | | TCCCCTTTTCCAAGCAAAGT′] |
| 1735 | NM_000155.3(GALT): c.350T > C | 2592 | GALT | [TCAGGACCCAGTGATCATCCCCTTTYCCAAG |
| | (p.Phe117Ser) | | | CAAAGTCTGCTCGAGGAGTC′] |
| 1736 | NM_000155.3(GALT): c.374T > C | 2592 | GALT | [′TTCCAAGCAAAGTCTGCTCGAGGAGYCTGG |
| | (p.Val125Ala) | | | TAACTATGGATTTCCCCTCTT′] |
| 1737 | NM_000155.3(GALT): c.425T > C | 2592 | GALT | [′TGGTCGGATGTAACGCTGCCACTCAHGTCGG |
| | (p.Met142Thr) | | | TCCCTGAGATCCGGGCTGTT′] |
| 1738 | NM_000155.3(GALT): c.452T > C | 2592 | GALT | [′TCGGTCCCTGAGATCCGGGCTGTTGYTGATG |
| | (p.Val151Ala) | | | CATGGGCCTCAGTCACAGAG′] |
| 1739 | NM_000155.3(GALT): c.460T > C | 2592 | GALT | [′TGAGATCCGGGCTGTTGTTGATGCABGGGCC |
| | (p.Trp154Arg) | | | TCAGTCACAGAGGAGCTGGG′] |
| 1740 | NM_000155.3(GALT): c.482T > C | 2592 | GALT | [′GCATGGGCCTCAGTCACAGAGGAGCYGGGT |
| | (p.Leu161Pro) | | | GCCCAGTACCCTTGGGTGCAG′] |
| 1741 | NM_000155.3(GALT): c.499T > C | 2592 | GALT | [′AGAGGAGCTGGGTGCCCAGTACCCTYGGGT |
| | (p.Trp167Arg) | | | GCAGGTTTGTGAGGTCGCCCC′] |
| 1742 | NM_000155.3 (GALT): c.507 + 2T > | 2592 | GALT | [′GGTGCCCAGTACCCTTGGGTGCAGGYTTGTG |
| | C | | | AGGTCGCCCCTTCCCCTGGA′] |
| 1743 | NM_000155.3(GALT): c.509T > C | 2592 | GALT | [′GAGCTCCGTATCCCTATCTGATAGAHCTTTG |
| | (p.Ile170Thr) | | | AAAACAAAGGTGCCATGATG′] |
| 1744 | NM_000155.3(GALT): c.584T > C | 2592 | GALT | [′TGACAGGTATGGGCCAGCAGTTTCCYGCCA |
| | (p.Leu195Pro) | | | GATATTGCCCAGCGTGAGGAG′] |
| 1745 | NM_000155.3(GALT): c.650T > C | 2592 | GALT | [′TATAAGAGTCAGCATGGAGAGCCCCYGCTA |
| | (p.Leu217Pro) | | | ATGGAGTACAGCCGCCAGGAG′] |
| 1746 | NM_000155.3(GALT): c.677T > C | 2592 | GALT | [′CTAATGGAGTACAGCCGCCAGGAGCYACTC |
| | (p.Leu226Pro) | | | AGGAAGGTGGGAGAGAGCCAA′] |
| 1747 | NM_000155.3(GALT): c.687 + 2T > | 2592 | GALT | [′AGCCGCCAGGAGCTACTCAGGAAGGYGGGA |
| | C | | | GAGAGCCAAGCCCTGTGTCCC′] |
| 1748 | NM_000155.3(GALT): c.745T > C | 2592 | GALT | [′AGTACTGGTCCCCTTCTGGGCAACAYGGCCC |
| | (p.Trp249Arg) | | | TACCAGACACTGCTGCTGCC′] |
| 1749 | NM_000155.3(GALT): c.967T > C | 2592 | GALT | [′CCATTGGCAGCTGCACGCTCATTACBACCCT |
| | (p.Tyr323His) | | | CCGCTCCTGCGCTCTGCCAC′] |
| 1750 | NM_000155.3(GALT): c.980T > C | 2592 | GALT | [′CACGCTCATTACTACCCTCCGCTCCYGCGCT |
| | (p.Leu327Pro) | | | CTGCCACTGTCCGGAAATTC′] |
| 1751 | NM_000155.3(GALT): c.1138T > | 2592 | GALT | [′GGACAGGGAGACAGCAACCATCGCCYGACC |
| | C (p.Ter380Arg) | | | ACGCCGACCACAGGGCCTTGA′] |
| 1752 | NM_207346.2(TSEN54): c.277T > | 283989 | TSEN54 | [′AGAAGAGGGCTTCGTGGAGTTGAAGYCTCC |
| | C (p.Ser93Pro) | | | CGCGGTGAGCGGCGGGCTCGG′] |
| 1753 | NM_016269.4(LEF1): c.181T > C | −1 | — | [′CATCAAGTCTTCCTTGGTGAACGAGYCTGAA |
| | (p.Ser61Pro) | | | ATCATCCCGGCCAGCAACGG′] |
| 1754 | NM_001928.2(CFD): c.640T > C | 1675 | CFD | [′GGGTGACTCCGGGGGCCCGCTGGTGYGCGG |
| | (p.Cys214Arg) | | | GGGCGTGCTCGAGGGCGTGGT′] |
| 1755 | NM_001458.4(FLNC): c.752T > C | 2318 | FLNC | [′CCCAACGTGGATGAGCATTCTGTTAYGACCT |
| | (p.Met251Thr) | | | ACCTGTCCCAGTTCCCCAAG′] |
| 1756 | NM_000781.2(CYP11A1): c.665T > | 1583 | CYP11A1 | [′ATTTTTGGGGAGCGCCAGGGGATGCYGGAG |
| | C (p.Leu222Pro) | | | GAAGTAGTGAACCCCGAGGCC′] |
| 1757 | NM_000782.4(CYP24A1): c.1226T > | 1591 | CYP24A1 | [ATAATAATGATGGTTGccaacatgcgctgagt |
| - | C (p.Leu409Ser) | | | gcttaaaatgtgccaggta′, |
| 1761 | | | | ′ataaataggtaaagggctttagaattgtgcac |
| | | | | catactcacaaccaccctg′, |
| | | | | ′cgcagcagattctgttattaaacccchttaca |
| | | | | gacgaagttgaggctcac′, |
| | | | | ′agagattatgtaactcactcaagacaacacag |
| | | | | ataaaagatgaaactgaat′, |
| | | | | ′ACAAATTCTACTTACTCCTTTGGGTRAAGCAT |
| | | | | ATTCACCCAGAACTGTTGC′] |
| 1762 | NM_001145661.1(GATA2): c.1117T > | 2624 | GATA2 | [′CAACGGGGACCCTGTCTGCAACGCCYGTGG |
| | C (p.Cys373Arg) | | | CCTCTACTACAAGCTGCACAA′] |
| 1763 | NM_004523.3(KIF11): c.2547 + 2T > | 3832 | KIF11 | [′CAGGAACTTCACAACTTATTGGAGGYAATA |
| | C | | | ACTTTGTAAGTGGAACTTACT′] |
| 1764 | NM_000238.3(KCNH2): c.1831T > | 3757 | KCNH2 | [′GGGCGGCCCCTCCATCAAGGACAAGBATGT |
| | C (p.Tyr611His) | | | GACGGCGCTCTACTTCACCTT′] |
| 1765 | NM_002465.3(MYBPC1): c.706T > | 4604 | MYBPC1 | [′GGAGGAAGAACCCCAGGTGGACGTAYGGGA |
| | C (p.Trp236Arg) | | | GTTGCTGAAGAACGCGAAACC′] |
| 1766 | NM_002465.3(MYBPC1): c.2566T > | 4604 | MYBPC1 | [′CATTCCAAGACACCTGAAGCAAACCYATAT |
| | C (p.Tyr856His) | | | CCGCAGAGTTGGAGAAGCTGT′] |
| 1767 | NM_005211.3(CSF1R): c.2624T > | 1436 | CSF1R | [′AAACTGGTGAAGGATGGATACCAAAYGGCC |
| | C (p.Met875Thr) | | | CAGCCTGCATTTGCCCCAAAG′] |
| 1768 | NM_005211.3(CSF1R): c.2381T > | 1436 | CSF1R | [′TTGACCAATGGTCATGTGGCCAAGAYTGGG |
| | C (p.Ile794Thr) | | | GACTTCGGGCTGGCTAGGGAC′] |
| 1769 | NM_003392.4(WNT5A): c.544T > | 7474 | WNT5A | [′GCCGCGGGACTGGCTCTGGGGCGGCYGCGG |
| | C (p.Cys182Arg) | | | CGACAACATCGACTATGGCTA′] |
| 1770 | NM_005188.3(CBL): c.1150T > C | 867 | CBL | [′CTCCACATTCCAACTATGTAAAATABGTGCT |
| | (p.Cys384Arg) | | | GAAAATGATAAGGATGTAAA′] |
| 1771 | NM_005188.3(CBL): c.1186T > C | 867 | CBL | [′TGATAAGGATGTAAAGATTGAGCCCYGTGG |
| | (p.Cys396Arg) | | | ACACCTCATGTGCACATCCTG′] |
| 1772 | NM_006902.4(PRRX1): c.338T > | 5396 | PRRX1 | [′CAGCTGCAGGCTTTGGAGCGTGTCTYTGAGC |
| | C (p.Phe113Ser) | | | GGACACACTATCCTGATGCT′] |
| 1773 | NM_001111035.1(ACP5): c.602T > | −1 | — | [′GCGGCGGCCAGGGAGGACTACGTGCYGGTG |
| | C (p.Leu201Pro) | | | GCTGGCCACTACCCCGTGTGG′] |
| 1774 | NM_000329.2(RPE65): c.1102T > | 6121 | RPE65 | [′GGCTCCCCAACCTGAAGTTAGGAGAYATGT |
| | C (p.Tyr368His) | | | ACTTCCTTTGAATATTGACAA′] |
| 1775 | NM_003172.3(SURF1): c.679T > | 6834 | SURF1 | [′TGAGAACAATCCAGAAAGGAACCACYGGCA |
| | C (p.Trp227Arg) | | | TTATCGAGACCTGGAAGCTAT′] |
| 1776 | NM_002734.4(PRKAR1A): c.1117T > | 5573 | PRKAR1A | [′CATCCTCAAACGAAACATCCAGCAGYACAA |
| | C (p.Tyr373His) | | | CAGTTTTGTGTCACTGTCTGT′] |
| 1777 | NM_002734.4(PRKAR1A): c.980T > | 5573 | PRKAR1A | [′CCATCTTTGCTTTCTCCAGGTGAAAYTGCAC |
| | C (p.Ile327Thr) | | | TACTGATGAATCGTCCTCGT′] |
| 1778 | NM_003491.3(NAA10): c.109T > | 8260 | NAA10 | [GAAATACTACTTCTACCATGGCCTTYCCTGG |
| | C (p.Ser37Pro) | | | CCCCAGGTGGGCAGCTTCTG′] |
| 1779 | NM_006306.3(SMC1A): c.2351T > | 8243 | SMC1A | [′GTGTTTGAAGAGTTTTGTCGGGAGAYTGGTG |
| | C (p.Ile784Thr) | | | TGCGCAACATCCGGGAGTTT′] |
| 1780 | NM_000377.2(WAS): c.814T > C | 7454 | WAS | [′CGACCCAGATCTGCGGAGTCTGTTCYCCAGG |
| | (p.Ser272Pro) | | | GCAGGAATCAGCGAGGCCCA′] |
| 1781 | NM_000377.2(WAS): c.881T > C | 7454 | WAS | [′ACCTCTAAACTTATCTACGACTTCAYTGAGG |
| | (p.Ile294Thr) | | | ACCAGGGTGGGCTGGAGGCT′] |
| 1782 | m.12338T > C | 4540 | MT-NDS | [′TTGGTGCAACTCCAAATAAAAGTAAYAACC |
| | | | | ATGCACACTACTATAACCACC′] |
| 1783 | m.5814T > C | 4511 | MT-TC | [′TCGAATTTGCAATTCAATATGAAAAYCACCT |
| | | | | CGGAGCTGGTAAAAAGAGGC′] |
| 1784 | m.12201T > C | 4564 | MT-TH | [′GACAACAGAGGCTTACGACCCCTTAYTTACC |
| | | | | GAGAAAGCTCACAAGAACTG′] |
| 1785 | NM_001165899.1(PDE4D): c.494T > | 5144 | PDE4D | [′GGAGATGACTTGATTGTGACTCCATBTGCTC |
| | C (p.Phe165Ser) | | | AGGTAAGCACAGCTTGGTGA′] |
| 1786 | NM_139125.3(MASP1): c.1888T > | 5648 | MASP1 | [′GTTACCCGTGGTGCCTCACGCTGAGYGCAA |
| | C (p.Cys630Arg) | | | AACTAGCTATGAGTCCCGCTC′] |
| 1787 | NM_007315.3(STAT1): c.520T > | 6772 | STAT1 | [′TTTACAAGATGAATATGACTTCAAAYGCAA |
| | C (p.Cys174Arg) | | | AACCTTGCAGAACAGAGGTAA′] |
| 1788 | NM_053025.3(MYLK): c.5275T > | -1 | — | [′TGCTGTGAGAGCCATTGGAAGACTGYCCTCT |
| | C (p.Ser1759Pro) | | | ATGGCAATGATCTCAGGGCT′] |
| 1789 | NM_001235.3(SERPINH1): c.233T > | 871 | SERPINH1 | [′TCACCCGTGGTGGTGGCCTCGTCGCYAGGGC |
| | C (p.Leu78Pro) | | | TCGTGTCGCTGGGCGGCAAG′] |
| 1790 | NM_005921.1(MAP3K1): c.566T > | 4214 | MAP3K1 | [′GAGGAACGAATGATCAGGGAGAAACBGAA |
| | C (p.Leu189Pro) | | | GGCAACCTGTATGCCAGCCTGG′] |
| 1791 | NM_005359.5(SMAD4): c.1499T > | 4089 | SMAD4 | [′GTTGATGACCTTCGTCGCTTATGCAYACTCA |
| | C (p.Ile500Thr) | | | GGATGAGTTTTGTGAAAGGC′] |
| 1792 | NM_000287.3(PEX6): c.1601T > | 5190 | PEX6 | [′CTGTTGCTCACAGCTGTGGACCTTCYGGGCC |
| | C (p.Leu534Pro) | | | GGGACCGTGATGGGCTGGGT′] |
| 1793 | NM_004153.3(ORC1): c.266T > C | 4998 | ORC1 | [′AAGAAACGTGCTCGAGTACAGTGGTYTGTC |
| | (p.Phe89Ser) | | | CGATTCTGTGAAGTCCCTGCC′] |
| 1794 | NM_006225.3(PLCD1): c.562T > | 5333 | PLCD1 | [′CTCGGCTGTCCTGGCTCTGCAGGAGYGTGAC |
| | C (p.Cys188Arg) | | | CACTCCCAGACAGACTCCCT′] |
| 1795 | NM_021252.4(RAB18): c.619T > | 22931 | RAB 18 | [′CTGTGGTGGTTATTGCTCTGTGTTAYAAACT |
| | C (p.Ter207Gln) | | | CTGGGAAATTCCATCTCTTG′] |
| 1796 | NM_002242.4(KCNJ13): c.722T > | −1 | — | [′TGGTGTAATGGAGTGATAGTACGTTDGTGG |
| | C (p.Leu241Pro) | | | AAAGATGAAGAATGGACATTC′] |
| 1797 | NM_003072.3(SMARCA4): c.3032T > | 6597 | SMARCA4 | [′CTGCAGCGAGTGCTCTACCGCCACAYGCAG |
| | C (p.Met1011Thr) | | | GCCAAGGGCGTGCTGCTGACT′] |
| 1798 | NM_013339.3 (AL G6): c.391T > C | 29929 | ALG6 | [′GAGATTTCTTTTAAGCAACAACAGTRCAAAA |
| | (p.Tyr131His) | | | CCACTGCAGGTATGTAAATC′] |
| 1799 | NM_019885.3(CYP26B1): c.436T > | 56603 | CYP26B1 | [′TTGCCTCTCTGCCTTCCAGGTCTTCYCCAAG |
| | C (p.Ser146Pro) | | | ATCTTCAGCCACGAGGCCCT′] |
| 1800 | NM_020433.4(JPH2): c.421T > C | 57158 | JPH2 | [′GTTCACCAACGGCATGCGCCATGGCYACGG |
| | (p.Tyr141His) | | | AGTACGCCAGAGCGTGCCCTA′] |
| 1801 | NM_000199.3(SGSH): c.892T > C | 6448 | SGSH | [′CCCCAGCGTTTTGGGTGCTCCGGGGRTGACA |
| | (p.Ser298Pro) | | | CCAGTAAGGGTTCAGCAGTG′] |
| 1802 | NM_173170.1(IL36RN): c.80T > | 26525 | IL36RN | [′CTTTATCTGCATAATAACCAGCTTCYAGCTG |
| | C (p.Leu27Pro) | | | GAGGGCTGCATGCAGGGAAG′] |
| 1803 | NM_016599.4(MYOZ2): c.142T > | 51778 | MYOZ2 | [′CAGAGACATCATGTTGGAAGAATTAYCCCA |
| | C (p.Ser48Pro) | | | TCTCAGTAACCGTGGTGCCAG′] |
| 1804 | NM_020191.2(MRPS22): c.644T > | 56945 | MRPS22 | [′CCAATAATTTTCAAGGAAGAAAATCYTAGG |
| | C (p.Leu215Pro) | | | GTAAGGTGACTTAGGTTTTAT′] |
| 1805 | NM_004278.3(PIGL): c.500T > C | 9487 | PIGL | [′TTGTCCTATCCCTCCTCCAGGGCCCYGCACT |
| | (p.Leu167Pro) | | | CAGAAGGGAAGTTACCTAAA′] |
| 1806 | NM_022445.3(TPK1): c.119T > C | 27010 | TPK1 | [′ATTTTGTTCTTTCTATTTGAAGCTCYTTTAAG |
| | (p.Leu40Pro) | | | AGCCTGTGCCGATGGAGGT′] |
| 1807 | NM_020634.1(GDF3): c.914T > C | 9573 | GDF3 | [′TGTCCCTTCTCACTGACCATCTCTCYCAACA |
| | (pLeu305Pro) | | | GCTCCAATTATGCTTTCATG′] |
| 1808 | NM_017882.2(CLN6): c.200T > C | 54982 | CLN6 | [′CCCATTCTTCCATTTGCTCCGCAGCYGGTAT |
| | (p.Leu67Pro) | | | TCCCTCTCGAGTGGTTTCCA′] |
| 1809 | NM_024513.3(FYC01): c.4127T > | 79443 | FYCO1 | [′TTTGTGAGGTCCAGCACCTACAGCCYGATCC |
| | C (p.Leu1376Pro) | | | CCATCACTGTGGCCGAGGCA′] |
| 1810 | NM_006147.3(IRF6): c.65T > C | 3664 | 1RF6 | [′CTGGTGGCCCAGGTGGATAGTGGCCYCTAC |
| | (p.Leu22Pro) | | | CCTGGGCTCATCTGGCTACAC′] |
| 1811 | NM_025132.3(WDR19): c.2129T > | 57728 | WDR19 | [′GGAAATGTTGGCATAGTGATGTCCTYGGAA |
| | C (p.Leu710Ser) | | | CAAATAAAGGTAAACAGCATG′] |
| 1812 | NM_025132.3(WDR19): c.20T > | 57728 | WDR19 | [′TTTATTTTTTAGCGTATTTTCTCACYGCTAGA |
| | C (p.Leu7Pro) | | | AAAGACTTGGCTTGGCGCA′] |
| 1813 | NM_153026.2(PRICKLE1): c.1414T > | 144165 | PRICKLE1 | [′AAGTAAAAAATACCAGTCTGATATGYACTG |
| | C (p.Tyr472His) | | | GGCACAGTCACAAGATGGACT′] |
| 1814 | NM_014874.3(MFN2): c.1392 + | 9927 | MFN2 | [′GTAGTCCTCAAGGTTTATAAGAATGWGAGT |
| | 2T > C | | | CATGGAGCAACAGGTCCTCTT′] |
| 1815 | NM_014874.3(MFN2): c.647T > C | 9927 | MFN2 | [′GAGCTGGACAGCTGGATTGACAAGTYTTGT |
| | (p.Phe216Ser) | | | CTGGATGCTGATGTGTTTGTG′] |
| 1816 | NM_016097.4(IER31P1): c.233T > | 51124 | IER3IP1 | [′GTAAACTCAATTGCAATTGTGTTACYTTTAT |
| | C (p.Leu78Pro) | | | TATTTGGATGAATATCAGTG′] |
| 1817 | NM_018718.2(CEP41): c.107T > | 95681 | CEP41 | [′TTCGAGCTTCTCAGTATATTTAGTCRTACTGT |
| | C (p.Met36Thr) | | | TACCTAAAAAGAAAATAAG′] |
| 1818 | NM_022489.3(INF2): c.310T > C | 64423 | INF2 | [′CCTGCTGCAGCTCACCTGCGTCAGCYGCGTG |
| | (p.Cys104Arg) | | | CGCGCCGTCATGAACTCGCG′] |
| 1819 | NM_022489.3(INF2): c.383T > C | 64423 | INF2 | [′AGCAACCAGGGCTACGTGCGCCAGCYCTCC |
| | (p.Leu128Pro) | | | CAGGGTGAGCCGCAGTGTGGG′] |
| 1820 | NM_018713.2(SLC30A10): c.266T > | 55532 | SLC30A10 | [′GGCGCGCTGAGCAACGCGGTCTTCCYCACC |
| | C (p.Leu89Pro) | | | GCGCTCTGCTTCACCATCTTC′] |
| 1821 | NM_058246.3(DNAJB6): c.277T > | 10049 | DNAJB6 | [′CAGTCCATTTGAATTTGGCTTCACAYTCCGT |
| | C (p.Phe93Leu) | | | AACCCAGATGATGTCTTCAG′] |
| 1822 | NM_024753.4(TTC21B): c.2384T > | 79809 | TTC21B | [′CAAAAGAATTATCTTTGCTATGACCYGGCTG |
| | C (p.Leu795Pro) | | | AGCTCTTATTAAAATTGAAA′] |
| 1823 | NM_032446.2(MEGF10): c.2320T > | 84466 | MEGF10 | [′TGACTGCGACCACATTTCTGGGCAGYGTACT |
| | C (p.Cys774Arg) | | | TGCCGCACTGGATTCATGGG′] |
| 1824 | NM_032446.2(MEGF10): c.976T > | 84466 | MEGF10 | [′CGTTCTCTGTGCTGAGACCTGCCAGYGTGTC |
| | C (p.Cys326Arg) | | | AACGGAGGGAAGTGTTACCA′] |
| 1825 | NM_024027.4(COLEC11): c.505T > | 78989 | COLEC11 | [′GAAGCGCTACGCGGACGCCCAGCTGYCCTG |
| | C (p.Ser169Pro) | | | CCAGGGCCGCGGGGGCACGCT′] |
| 1826 | NM_000035.3(ALDOB): c.1027T > | 229 | ALDOB | [′GCCCCAGAAGAACCCGTGTGAACATRCTGT |
| | C (p.Tyr343His) | | | CCTTTGGCCGCCTGGCAGTTA′] |
| 1827 | NM_012338.3(TSPAN12): c.734T > | 23554 | TSPAN12 | [′CCTTCTATCATAATACAGAGCCCAGRGCAGA |
| | C (p.Leu245Pro) | | | GTAATGGTGAGAATCATGGC′] |
| 1828 | NM_001159772.1(CANT1): c.671T > | 124583 | CANT1 | [′CTCCTTGCCCAGGCCGCCCACGTACRGACGC |
| | C (p.Leu224Pro) | | | TCGTCCTTCACTGCCAGCCA′] |
| 1829 | NM_001006657.1(WDR35): c.781T > | 57539 | WDR35 | [′TGGCATGTACGTAGTAGGCATCCAGYGGAA |
| | C (p.Trp261Arg) | | | CCACATGGGCAGCGTGTTAGC′] |
| 1830 | NM_000420.2(KEL): c.1790T > C | 3792 | KEL | [′TCAACAGTACTGCCTGGGGGCTGCCYCGCCT |
| | (p.Leu597Pro) | | | GTGACAACCATGCCCTCCAG′] |
| 1831 | NM_001243473.1(B9D1): c.400 + | 27077 | B9D1 | [′AGGGCCCAGGTCAGAATGAGGACCTRCCGG |
| | 2T > C | | | CCAGGTGAGAAGGGCACGTGC′] |
| 1832 | NM_015175.2(NBEAL2): c.1163T > | 23218 | NBEAL2 | [′ATTGCAGTCCATGTAGTCAGAGTGCYGACCT |
| | C (p.Leu388Pro) | | | GCATCATGAGTGACTCCCCC′] |
| 1833 | NM_000196.3(HSD11B2): c.1012T > | 3291 | HSD11B2 | [′GCTGGCAGCTCGGCCCCGCCGCCGCYATTAC |
| | C (p.Tyr338His) | | | CCCGGCCAGGGCCTGGGGCT′] |
| 1834 | NM_024599.5(RHBDF2): c.557T > | 79651 | RHBDF2 | [′GCTTACCGCCCCCCTCCCTTCCAGAYTGTGG |
| | C (p.Ile186Thr) | | | ATCCGCTGGCCCGGGGCCGG′] |
| 1835 | NM_001256714.1(DNAAF3): c. | 352909 | DNAAF3 | [′GGCTCTGTGGATGGACGGCACCTGCYGCGG |
| | 386T > C (p.Leu129Pro) | | | ACCCTGTCCCGAGCGAAGTTC′] |
| 1836 | NM_020894.2(UVSSA): c.94T > C | 57654 | UVSSA | [′GAAAATGAAGGAACTGAAGAAAATTYGCAA |
| | (p.Cys32Arg) | | | GTATGTCTTAGGGTTCAGTAA] |
| 1837 | NM_004453.3(ETFDH): c.1130T > | 2110 | ETFDH | [′TTGTTTCCTCAGTCTATACCAAAACYCACCT |
| | C (p.Leu377Pro) | | | TTCCTGGTGGTTTACTAATT′] |
| 1838 | NM_024306.4(FA2H): c.707T > C | 79152 | FA2H | [′CTCATCGAGTACCTCATCCACCGCTYCCTGT |
| | (p.Phe236Ser) | | | TCCACATGAAGCCCCCCAGC′] |
| 1839 | NM_001004127.2(ALG11): c.1142T > | −1 | — | [′AAAATAAACATTCCATTTGATGAATYAAAG |
| | C (p.Leu381Ser) | | | AATTATTTGTCTGAAGCAACA] |
| 1840 | NM_021167.4(GATAD1): c.304T > | 57798 | GATAD1 | [′TCGGCTCAGAAACACTAAATACAAAYCTGC |
| | C (p.Ser102Pro) | | | TCCGGCTGCTGAAAAGAAAGT′] |
| 1841 | NM_016042.3(EXOSC3): c.712T > | 51010 | EXOSC3 | [′AGTATTTGGAATGAATGGAAGAATAYGGGT |
| | C (p.Trp238Arg) | | | TAAGGCAAAAACCATCCAGCA′] |
| 1842 | NM_001018005.1(TPM1): c.515T > | 7168 | TPM1 | [′CAGGTGGCCCGTAAGCTGGTCATCAYTGAG |
| | C (p.Ile172Thr) | | | AGCGACCTGGAACGTGCAGAG′] |
| 1843 | NM_001018005.1(TPM1): c.842T > | 7168 | TPM1 | [′GAGCTGGACCACGCTCTCAACGATAYGACT |
| | C (p.Met281Thr) | | | TCCATGTAAACGTTCATCCAC′] |
| 1844 | NM_033360.3(KRAS): c.211T > C | 3845 | KRAS | [′GGAGTACAGTGCAATGAGGGACCAGYACAT |
| | (p.Tyr71His) | | | GAGGACTGGGGAGGGCTTTCT′] |
| 1845 | NM_006218.2(PEK3CA): c.1258T > | 5290 | PIK3CA | [′TTTTTCTTTGTTTTTTAAGGAACACYGTCCAT |
| | C (p.Cys420Arg) | | | TGGCATGGGGAAATATAAA′] |
| 1846 | NM_006265.2(RAD21): c.1753T > | −1 | — | [′TGAATCTATCAGTTTGCTTGAGTTAYGTCGA |
| | C (p.Cys585Arg) | | | AATACGAACAGAAAACAAGC′] |
| 1847 | NM_000222.2(KIT): c.1859T > C | 3815 | KIT | [′ATTAAGTCAGATGCGGCCATGACTGYCGCT |
| | (p.Val620Ala) | | | GTAAAGATGCTCAAGCGTAAG′] |
| 1848 | NM_000076.2(CDKN1C): c.827T > | 1028 | CDKN1C | [′CGCGCGCTGTCGCCCGCAGATTTCTYCGCCA |
| | C (p.Phe276Ser) | | | AGCGCAAGAGATCAGCGCCT′] |
| 1849 | NM_005691.3(ABCC9): c.3058T > | 10060 | ABCC9 | [′AGACTATTGGCTGGCCACATGGACAYCGGA |
| | C (p.Ser1020Pro) | | | GTACAGTATAAACAATACTGG′] |
| 1850 | NM_012343.3(NNT): c.2930T > C | 23530 | NNT | [′ATGCCTGGTCAGCTTAATGTGCTGCYGGCTG |
| | (p.Leu977Pro) | | | AGGCTGGTGTGCCATATGAC′] |
| 1851 | NM_024110.4(CARD14): c.467T > | 79092 | CARD14 | [′GTGCTGCTGCGGCGGTGCCAGCAGCYGCAG |
| | C (p.Leu156Pro) | | | GAGCACCTGGGCCTGGCCGAG′] |
| 1852 | NM_000492.3(CFTR): c.1400T > | 1080 | CFTR | [′GATGGGTTTTATTTCCAGACTTCACYTCTAA |
| | C (p.Leu467Pro) | | | TGGTGATTATGGGAGAACTG′] |
| 1853 | NM_000518.4(HBB): c.2T > C | 3043 | HBB | [′CACTAGCAACCTCAAACAGACACCANGGTG |
| | (p.Met1Thr) | | | CATCTGACTCCTGAGGAGAAG′] |
| 1854 | NM_000518.4(HBB): c.*110T > C | 3043 | HBB | [′CCTTGAGCATCTGGATTCTGCCTAAHAAAAA |
| | | | | ACATTTATTTTCATTGCAAT′] |
| 1855 | NM_000518.4(HBB): c.92 + 2T > C | 3043 | HBB | [′AGTTGGTGGTGAGGCCCTGGGCAGGNTGGT |
| | | | | ATCAAGGTTACAAGACAGGTT′] |
| 1856 | NM_000206.2(IL2RG): c.455T > | 3561 | IL2RG | [′ACCACATATGCACACATATCTCCAGYGATCC |
| | C (p.Val152Ala) | | | CCTGGGCTCCAGAGAACCTA′] |
| 1857 | NM_000244.3(MEN1): c.518T > C | 4221 | MEN1 | [′GCTGTGGTTGGGGCCTGCCAGGCCCYGGGT |
| | (p.Leu173Pro) | | | CTCCGGGATGTCCACCTCGCC′] |
| 1858 | NM_000256.3(MYBPC3): c.2374T > | 4607 | MYBPC3 | [′CCGCCATCGTAGGCAGGCGGCTCCCVCTGTA |
| | C (p.Trp792Arg) | | | CTGTGCAGGAGTCCTCTCCC′] |
| 1859 | NM_002501.3(NFIX): c.179T > C | 4784 | NFIX | [′GAGGAGCGGGCGGTGAAGGACGAGCYGCTG |
| | (p.Leu60Pro) | | | GGCGAGAAGCCCGAGATCAAG′] |
| 1860 | NM_005022.3(PFN1): c.341T > C | 5216 | PFN1 | [′CCTCCTCCAGCGCTAGTCCTGCTGAYGGGCA |
| | (p.Met114Thr) | | | AAGAAGGTGTCCACGGTGGT′] |
| 1861 | NM_001172567.1(MYD88): c.818T > | 4615 | MYD88 | [′CTTGCAGGTGCCCATCAGAAGCGACYGATC |
| | C (p.Leu273Pro) | | | CCCATCAAGTACAAGGCAATG′] |
| 1862 | NM_001161581.1(POC1A): c.398T > | 25886 | POC1A | [′GCCAGTGATGACAAGACTGTTAAGCYGTGG |
| | C (p.Leu133Pro) | | | GACAAGAGCAGCCGGGAATGT′] |
| 1863 | NM_005270.4(GLI2): c.4663T > C | 2736 | GLI2 | [′CCCCCGAAACTCCTTGACCCTGCCCYCCATC |
| | (p.Ser1555Pro) | | | CCCGCAGGCATCAGCAACAT′] |
| 1864 | NM_152296.4(ATP1A3): c.2431T > | 478 | ATP1A3 | [′CTCCTCCGCCTAGGTCCCTGCCATCYCACTG |
| | C (p.Ser811Pro) | | | GCGTACGAGGCTGCCGAAAG′] |
| 1865 | NM_022787.3(NMNAT1): c.838T > | 64802 | NMNAT1 | [′GAGAAACACTGCAGAAGCTAAGACAYAGGA |
| | C (p.Ter280Gln) | | | ATTCTACAGCATGATATTTCA′] |
| 1866 | NM_005340.6(HINT1): c.250T > | 3094 | HINT1 | [′ACACTTAATGATTGTTGGCAAGAAAYGTGCT |
| | C (p.Cys84Arg) | | | GCTGATCTGGGCCTGAATAA′] |
| 1867 | NM_000155.3(GALT): c.416T > C | 2592 | GALT | [′TTCCACCCCTGGTCGGATGTAACGCYGCCAC |
| | (p.Leu139Pro) | | | TCATGTCGGTCCCTGAGATC′] |
| 1868 | NM_000155.3(GALT): c.386T > C | 2592 | GALT | [′CTCCCGTCACCACCCAGTAAGGTCAYGTGCT |
| | (p.Met129Thr) | | | TCCACCCCTGGTCGGATGTA′] |
| 1869 | NM_000155.3(GALT): c.680T > C | 2592 | GALT | [′ATGGAGTACAGCCGCCAGGAGCTACYCAGG |
| | (p.Leu227Pro) | | | AAGGTGGGAGAGAGCCAAGCC′] |
| 1870 | NM_007294.3(BRCA1): c.4986 + | 672 | BRCA1 | [′GCCTGACCCCAGAAGAATTTGTGAGBGTATC |
| | 6T > C | | | CATATGTATCTCCCTAATGA′] |
| 1871 | NM_007294.3(BRCA1): c.5074 + | 672 | BRCA1 | [′CTACTCATGTTGTTATGAAAACAGGYATACC |
| | 2T > C | | | AAGAACCTTTACAGAATACC′] |
| 1872 | NM_007294.3(BRCA1): c.5207T > | 672 | BRCA1 | [′GGTTTCTTTCAGCATGATTTTGAAGBCAGAG |
| | C (p.Val1736Ala) | | | GAGATGTGGTCAATGGAAGA′] |
| 1873 | NM_002437.4(MPV17): c.186 + | 4358 | MPV17 | [′TGAAGCCCTGTTGAGGGGAGAACTTRCCAC |
| | 2T > C | | | AAAGCCACAGCCCAGGGACAC′] |
| 1874 | NM_002769.4(PRSS1): c.116T > | −1 | — | [′GAGGAGAATTCTGTCCCCTACCAGGYGTCCC |
| | C (p.Val39Ala) | | | TGAATTCTGGCTACCACTTC′] |
| 1875 | NM_004211.3(SLC6A5): c.1444T > | 9152 | SLC6A5 | [′GATTTTCTTCTCTTTATCTGCTGCAYGGGGA |
| | C (p.Trp82Arg) | | | GGCCTGATCACTCTCTCTTC′] |
| 1876 | NM_005211.3(CSF1R): c.2297T > | 1436 | CSF1R | [′TTCTCCAGCCAAGTAGCCCAGGGCAYGGCC |
| | C (p.Met766Thr) | | | TTCCTCGCTTCCAAGAATGTG′] |
| 1877 | NM_005211.3(CSF1R): c.2546T > | 1436 | CSF1R | [TATGGCATCCTCCTCTGGGAGATCTYCTCAC |
| | C (p.Phe849Ser) | | | TTGGTGAGCCACTGGGCCCA′] |
| 1878 | NM_005211.3(CSF1R): c.2603T > | 1436 | CSF1R | [′CTGGTGAACAGCAAGTTCTATAAACBGGTG |
| | C (p.Leu868Pro) | | | AAGGATGGATACCAAATGGCC′] |
| 1879 | NM_006796.2(AFG3L2): c.1997T > | 10939 | AFG3L2 | [′ATTTTTCAGATTGTTCAGTTTGGCABGAATG |
| | C (p.Met666Thr) | | | AAAAGGTTGGGCAAATCTCC′] |
| 1880 | NM_018713.2(SLC30A10): c.1046T > | 55532 | SLC30A10 | [′GTAAGTGGAAAGATTATTGCCACCCYGCAC |
| | C (p.Leu349Pro) | | | ATCAAGTATCCTAAGGACAGG′] |
| 1881 | NM_018713.2(SLC30A10): c.500T > | 55532 | SLC30A10 | [′GCGGAGGGCTGTGTCCCCGGCGCTTYCGGG |
| | C (p.Phe167Ser) | | | GGGCCTCAGGGCGCGGAGGAC′] |
| 1882 | NM_000060.3(BTD): c.212T > C | 686 | BTD | [′TATGAGCATCCATCCATCCTGAGTCYGAACC |
| | (p.Leu71Pro) | | | CTCTGGCTCTCATCAGCCGC′] |
| 1883 | NM_000495.4(COL4A5): c.438 + | 1287 | COL4A5 | [′TTTCCTGGTTTACAGGGTCCTCCAGYAAGTT |
| | 2T > C | | | ATAAAATTTGGGATTATGAT′] |
| 1884 | NM_000282.3(PCCA): c.491T > C | 5095 | PCCA | [′CAGGCAGCAGAAGATGTCGTTTTCAYTGGA |
| | (p.Ile164Thr) | | | CCTGACACACATGCTATTCAA′] |
| 1885 | NM_000532.4(PCCB): c.1556T > | 5096 | PCCB | [′ACACGTGCCCGAATCTGCTGTGACCYGGAT |
| | C (p.Leu519Pro) | | | GTCTTGGCCAGCAAGAAGGTA′] |
| 1886 | NM_001099274.1(TINF2): c.860T > | 26277 | TINF2 | [′CATAAGGAGCGCCCCACAGTCATGCYGTTTC |
| | C (p.Leu287Pro) | | | CCTTTAGGAATCTCGGCTCA′] |
| 1887 | NM_001099274.1(TINF2): c.862T > | 26277 | TINF2 | [′TAAGGAGCGCCCCACAGTCATGCTGYTTCCC |
| | C (p.Phe288Leu) | | | TTTAGGAATCTCGGCTCACC′] |
| 1888 | NM_001363.4(DKC1): c.1049T > | 1736 | DKC1 | [′TCAATGCCTGTAGCTATTGCATTAAYGACCA |
| | C (p.Met350Thr) | | | CAGCGGTCATCTCTACCTGC′] |
| 1889 | NM_001363.4(DKC1): c.1193T > | 1736 | DKC1 | [′AAGCTGATGATCAAGCAGGGCCTTCYGGAC |
| | C (p.Leu398Pro) | | | AAGCATGGGAAGCCCACAGAC′] |
| 1890 | NM_004614.4(TK2): c.156 + 2T > | 7084 | TK2 | [′CAGGAAAAAGAGAAAAAATCAGTGGYAAG |
| | C | | | TCCCTCTTTTATGTGTACTCTC′] |
| 1891 | NM_004614.4(TK2): c.644T > C | 7084 | TK2 | [′GAATACCTGGAAGCAATTCACCATCYCCAT |
| | (p.Leu215Pro) | | | GAGGAGTGGCTCATCAAAGGC′] |
| 1892 | NM_024312.4(GNPTAB): c.1208T > | 79158 | GNPTAB | [′ATCGAAGGGCTGTCCCAGAAGTTTAYTTACC |
| | C (p.Ile403Thr) | | | TAAATGATGATGTCATGTTT′] |
| 1893 | NM_024312.4(GNPTAB): c.3002T > | 79158 | GNPTAB | [′TTTGCCTTCTCTTATTTTTATTATCYCATGAG |
| | C (p.Leu1001Pro) | | | TGCAGTGCAGCCACTGAAT′] |
| 1894 | NM_198253.2(TERT): c.3043T > | 7015 | TERT | [′CCGCCATCCTCTCAGGTTTCACGCAYGTGTG |
| | C (p.Cys1015Arg) | | | CTGCAGCTCCCATTTCATCA′] |
| 1895 | NM_207352.3(CYP4V2): c.1021T > | 285440 | CYP4V2 | [′TACAACTGCAGCTGCAATAAACTGGYCCTTA |
| | C (p.Ser341Pro) | | | TACCTGTTGGGTTCTAACCC′] |
| 1896 | NM_207352.3(CYP4V2): c.655T > | 285440 | CYP4V2 | [′TGCTCAAAGTAATGATGATTCCGAGYATGTC |
| | C (p.Tyr219His) | | | CGTGCAGTTTATAGGTAAAT′] |
| 1897 | NM_000335.4(SCN5A): c.5504T > | 6331 | SCN5A | [′GCCAAGCCCAACCAGATAAGCCTCAYCAAC |
| | C (p.Ile1835Thr) | | | ATGGACCTGCCCATGGTGAGT′] |
| 1898 | NM_001111.4(ADAR): c.2615T > | 103 | ADAR | [′CTCGGCCGCAAGATTCTGGCCGCCAYCATTA |
| | C (p.Ile872Thr) | | | TGAAAAAAGACTCTGAGGAC′] |
| 1899 | NM_004281.3(BAG3): c.1385T > | 9531 | BAG3 | [′ATCGAAGAGTATTTGACCAAAGAGCYGCTG |
| | C (p.Leu462Pro) | | | GCCCTGGATTCAGTGGACCCC′] |
| 1900 | NM_183075.2(CYP2U1): c.784T > | 113612 | CYP2U1 | [′TTTTATGTCACGAGGCCTAGAAATCYGTCTG |
| | C (p.Cys262Arg) | | | AACAGTCAAGTCCTCCTGGT′] |
| 1901 | NM_006177.3(NRL): c.287T > C | 4901 | NRL | [′TTGGGGCTGAGTCCTGAAGAGGCCAYGGAG |
| | (p.Met96Thr) | | | CTGCTGCAGGGTCAGGGCCCA′] |
| 1902 | NM_000344.3(SMN1): c.388T > C | 6606 | SMN1 | [′AACCTGTGTTGTGGTTTACACTGGAYATGGA |
| | (p.Tyr130His) | | | AATAGAGAGGAGCAAAATCT′] |
| 1903 | NM_152692.4(C1GALT1C1): c. | 29071 | C1GALT1C1 | [′AGGAGGAATTGTCTTAAGTGTAGAAYCAAT |
| | 577T > C (p.Ser193Pro) | | | GAAAAGACTTAACAGCCTTCT′] |
| 1904 | NM_024531.4(SLC52A2): c.368T > | 79581 | SLC52A2 | [′TTAGCACTGGCCTTTGTGCTGGCACYGGCAT |
| | C (p.Leu123Pro) | | | GCTGTGCCTCGAATGTCACT′] |
| 1905 | NM_001253816.1(SLC52A2): c. | 79581 | SLC52A2 | [′GCTCACTGCAGGTCCTTGGCAGGGCYGGGC |
| | 1016T > C (p.Leu339Pro) | | | GGCCTCTCTCTGCTGGGCGTG′] |
| 1906 | NM_002609.3(PDGFRB): c.1973T > | 5159 | PDGFRB | [′TCGGAGCTGAAGATCATGAGTCACCYTGGG |
| | C (p.Leu658Pro) | | | CCCCACCTGAACGTGGTCAAC′] |
| 1907 | NM_020822.2(KCNT1): c.2386T > | 57582 | KCNT1 | [′CAACAGCTATGAAGACGCCAAGGCCYACGG |
| | C (p.Tyr796His) | | | GTTCAAGAACAAGCTGATCAT′] |
| 1908 | NM_001369.2(DNAH5): c.1121T > | 1767 | DNAH5 | [′ACTATAGATCATTTTAATTGCATTTRTAAGT |
| | C (p.Ile374Thr) | | | GTAGGAATAGCATCCATCAT′] |
| 1909 | NM_017802.3(DNAAF5): c.2384T > | 54919 | DNAAF5 | [′GTCCAGTACCTGTACCGAGAGTTGCYGGTTC |
| | C (p.Leu795Pro) | | | ACCTTGACGATCCAGAGAGG′] |
| 1910 | NM_006383.3(CIB2): c.272T > C | 10518 | C1B2 | [′GAGGGGAACCTCACTTTCAACGACTYTGTG |
| | (p.Phe91Ser) | | | GACATGTTTTCCGTGCTCTGC′] |
| 1911 | NM_006383.3(CIB2): c.368T > C | 10518 | C1B2 | [′ACAGACTTCAACACTGACAACTTCAYCTGCA |
| | (p.Ile123Thr) | | | AGGAGGACCTGGAGCTGACG′] |
| 1912 | NM_005334.2(HCFC1): c.- | 3054 | HCFC1 | [′TTAGTTGTTACTTCTTCACACAAGAYGGCGG |
| | 970T > C | | | CTCCCAGGGAGGAGGCATGA′] |
| 1913 | NM_178012.4(TUBB2B): c.350T > | 347733 | TUBB2B | [′GGAGCCGAGCTGGTCGACTCGGTCCYGGAT |
| | C (p.Leu117Pro) | | | GTGGTGAGGAAGGAGTCAGAG′] |
| 1914 | NM_000431.3(MVK): c.764T > C | 4598 | MVK | [′GTGGCTGGCGTCAGAAACAGGCTGCYCAAG |
| | (p.Leu255Pro) | | | GTGACTCTTGTTCCCTTCTTG′] |
| 1915 | NM_000431.3(MVK): c.122T > C | 4598 | MVK | [′TTGAACTTGAGAACATTCCTCCGGCYTCAAC |
| | (p.Leu41Pro) | | | CCCACAGCAATGGGAAAGTG′] |
| 1916 | NM_000431.3(MVK): c.1039 + 2T > | 4598 | MVK | [′GTGGCATCACACTCCTCAAGCCAGGYATCCC |
| | C | | | GGGGGTAGGTGGGCCAGGCT′] |
| 1917 | NM_000431.3(MVK): c.1094T > | 4598 | MVK | [′AAGCAGGCCCTGACCAGCTGTGGCTYTGAC |
| | C (p.Phe365Ser) | | | TGCTTGGAAACCAGCATCGGT′] |
| 1918 | NM_004055.4(CAPN5): c.731T > | 726 | CAPN5 | [′ACAGCAGCTGACATGGAGGCCCGCCYGGCG |
| | C (p.Leu244Pro) | | | TGCGGCCTGGTAAAGGGCCAC′] |
| 1919 | NM_133497.3(KCNV2): c.491T > | 169522 | KCNV2 | [GCCGTCTTCCAGCTGGTCTACAATTYCTACC |
| | C (p.Phe164Ser) | | | TGTCCGGGGTGCTGCTGGTG′] |
| 1920 | NM_006567.3(FARS2): c.986T > | 10667 | FARS2 | [′ATGATCCTCTACGACATCCCTGATAYCCGTC |
| | C (p.Ile329Thr) | | | TCTTCTGGTGTGAGGACGAG′] |
| 1921 | NM_020376.3(PNPLA2): c.757 + | 57104 | PNPLA2 | [′GCCTGCGCTTTCTGCAGCGGAACGGYGCGC |
| | 2T > C | | | GGACCCGGGCGGGAGAGGGCG′] |
| 1922 | NM_018344.5(SLC29A3): c.607T > | 55315 | SLC29A3 | [′TATGAGGAACTCCCAGGCACTGATAYCAGG |
| | C (p.Ser203Pro) | | | TGAGAGCCAGGGTCCGGGCAG′] |
| 1923 | NM_012275.2(IL36RN): c.115 + | 26525 | IL36RN | [′TGCAGGGAAGGTCATTAAAGGTTGGYGATG |
| | 6T > C | | | AAACATGACCCACTTTCCTTG′] |
| 1924 | m.9191T > C | 4508 | MT-ATP6 | [′TTCACACTTCTAGTAAGCCTCTACCYGCACG |
| | | | | ACAACACATAATGACCCACC′] |
| 1925 | NM_000108.4(DLD): c.140T > C | 1738 | DLD | [′GTAGTTGATGCTGATGTAACAGTTAYAGGTT |
| | (p.Ile47Thr) | | | CTGGTCCTGGAGGATATGTT′] |
| 1926 | NM_000080.3(CHRNE): c.223T > | −1 | — | [′AGAGGAGACTCTCACCACTAGCGTCYGGAT |
| | C (p.Trp75Arg) | | | TGGAATCGTGAGTCAAATCTG′] |
| 1927 | NM_004376.5(COX15): c.1030T > | 1355 | COX15 | [′TGCCATTACAGTGCTCTACTTCCTCBCTCGG |
| | C (p.Ser344Pro) | | | AGAATTCCCCTTCCTAGAAG′] |
| 1928 | NM_004333.4(BRAF): c.1403T > | 673 | BRAF | [′GGACAAAGAATTGGATCTGGATCATYTGGA |
| | C (p.Phe468Ser) | | | ACAGTCTACAAGGGAAAGTGG′] |
| 1929 | NM_004333.4(BRAF): c.1454T > | 673 | BRAF | [TTAGGTGATGTGGCAGTGAAAATGTYGAAT |
| | C (p.Leu485Ser) | | | GTGACAGCACCTACACCTCAG′] |
| 1930 | NM_005188.3(CBL): c.1201T > C | 867 | CBL | [′GATTGAGCCCTGTGGACACCTCATGYGCAC |
| | (p.Cys401Arg) | | | ATCCTGTCTTACATCCTGGCA′] |
| 1931 | NM_002834.3(PTPN11): c.211T > | 5781 | PTPN11 | [′CTATGACCTGTATGGAGGGGAGAAABTTGC |
| | C (p.Phe71Leu) | | | CACTTTGGCTGAGTTGGTCCA′] |
| 1932 | NM_002834.3(PTPN11): c.853T > | 5781 | PTPN11 | [′AAATAGATATAAAAACATCCTGCCCBGTAA |
| | C (p.Phe285Leu) | | | GTATCAATATTCCGCTCAGTA′] |
| 1933 | NM_002880.3(RAF1): c.769T > C | 5894 | RAF1 | [′AGGTTCCCTCTCCCAGAGGCAGAGGYCGAC |
| | (p.Ser257Pro) | | | ATCCACACCTAATGTCCACAT′] |
| 1934 | NM_002880.3(RAF1): c.1423T > | 5894 | RAF1 | [′AGTCCTTAACAAGCATTGAGATATAYTTCTC |
| | C (p.Phe475Leu) | | | CATGAAGGCTTAACAGTGAA′] |
| 1935 | NM_005633.3(SOS1): c.806T > C | 6654 | SOS1 | [′GGCCATATAGAAGATACAGTAGAAABGACA |
| | (p.Met269Thr) | | | GATGAAGGCAGTCCCCATCCA′] |
| 1936 | NM_005633.3(SOS1): c.1649T > | 6654 | SOS1 | [′ATATCTTTACAGTACCGGAGTACACYGGAA |
| | C (p.Leu550Pro) | | | AGGATGCTTGATGTAACAATG′] |
| 1937 | NM_005633.3(SOS1): c.2104T > | 6654 | SOS1 | [′TCGGCACTGGGTAGAGCACCACTTCYATGAT |
| | C (p.Tyr702His) | | | TTTGAAAGAGATGCATATCT′] |
| 1938 | NM_002755.3(MAP2K1): c.388T > | 5604 | MAP2K1 | [′CAACTCTCCGTACATCGTGGGCTTCYATGGT |
| | C (p.Tyr130His) | | | GCGTTCTACAGCGATGGCGA′] |
| 1939 | NC_012920.1: m.7505T > C | 4574 | MT-TS1 | [′TTTCAAGCCAACCCCATGGCCTCCAYGACTT |
| | | | | TTTCAAAAAGGTATTAGAAA′] |
| 1940 | NM_000084.4(CLCN5): c.674T > | 1184 | CLCN5 | [′GTGGCTTGCTGCTGTGGGAACATCCYGTGCC |
| | C (p.Leu225Pro) | | | ACTGCTTCAACAAATACAGG′] |
| 1941 | NM_000530.6(MPZ): c.89T > C | 4359 | MPZ | [′GCAGTGCTGTCCCCGGCCCAGGCCAYCGTG |
| | (p.Ile30Thr) | | | GTTTACACCGACAGGGAGGTC′] |
| 1942 | NM_000530.6(MPZ): c.244T > C | 4359 | MPZ | [′CCCTCATTCCTCATAGATCTTCCACYATGCC |
| | (p.Tyr82His) | | | AAGGGACAACCCTACATTGA′] |
| 1943 | NM_000530.6(MPZ): c.266T > C | 4359 | MPZ | [′CACTATGCCAAGGGACAACCCTACAHTGAC |
| | (p.Ile89Thr) | | | GAGGTGGGGACCTTCAAAGAG′] |
| 1944 | NM_000748.2(CHRNB2): c.923T > | 1141 | CHRNB2 | [′TACCTCATGTTCACCATGGTGCTTGYCACCT |
| | C (p.Val308Ala) | | | TCTCCATCGTCACCAGCGTG′] |
| 1945 | NM_003611.2(OFD1): c.111 + 2T > | 8481 | OFD1 | [′CGGGGTATACTGGATACACTCAAGGYATCG |
| | C | | | GATTTAGGCGTATCTGTGTCA′] |
| 1946 | NM_003611.2(OFD1): c.274T > C | 8481 | OFD1 | MAGATGTGGCTATGAATATTCACTTYCTGTT |
| | (p.Ser92Pro) | | | TTCTTTCCAGAAAGTGGTTT′] |
| 1947 | NM_024408.3(NOTCH2): c.1117T > | 4853 | NOTCH2 | [′GCCCCACCCTGTGACAGGTCTCCTGYGTCAT |
| | C (p.Cys373Arg) | | | CTGGATGATGCATGCATCAG′] |
| 1948 | NM_024408.3(NOTCH2): c.1438T > | 4853 | NOTCH2 | [′TCTGGATAAGATTGGAGGCTTCACAYGTCTG |
| | C (p.Cys480Arg) | | | TGCATGCCAGGTAAATGGGC′] |
| 1949 | NM_000540.2(RYR1): c.9242T > | 6261 | RYR1 | [′CCCCGCTGCCCTTCTAGGACAGTGAYGAAGT |
| | C (p.Met3081Thr) | | | CAGGCCCTGAGATCGTGAAG′] |
| 1950 | NM_000096.3(CP): c.650T > C | 1356 | CP | [′AAAGAAAAACATATTGACCGAGAATYTGTG |
| | (p.Phe217Ser) | | | GTGATGTTTTCTGTGGTGGAT′] |
| 1951 | NM_000096.3(CP): c.548T > C | 1356 | CP | [′GTGACTAGGATTTACCATTCCCACABTGATG |
| | (p.Ile183Thr) | | | CTCCAAAAGATATTGCCTCA′] |
| 1952 | NM_000540.2(RYR1): c.1205T > | 6261 | RYR1 | [′CAGGAGGAGTCCCAGGCCGCCCGCAYGATC |
| | C (p.Met402Thr) | | | CACAGCACCAATGGCCTATAC′] |
| 1953 | NM_006517.4(SLC16A2): c.1253T > | 6567 | SLC16A2 | [′TTCGGGGGCCTTATCGTCGTCTGTCYTTTCCT |
| | C (p.Leu418Pro) | | | GGGCCTTTGCGATGGCTTC′] |
| 1954 | NM_000096.3(CP): c.1123T > C | 1356 | CP | [′CCGTGGGAAGCATGTTAGACACTACYACAT |
| | (p.Tyr375His) | | | TGCCGCTGAGGAAATCATCTG′] |
| 1955 | NM_002739.3(PRKCG): c.391T > | 5582 | PRKCG | [′CGGGCTTGTGCACCAGGGCATGAAAHGCTC |
| | C (p.Cys131Arg) | | | CTGTGAGTGACCTGGGCCTTG′] |
| 1956 | NM_000116.4(TAZ): c.310T > C | 6901 | TAZ | [′GACCCCTGCAGCTGCAGACATCTGCYTCACC |
| | (p.Phe104Leu) | | | AAGGAGCTACACTCCCACTT′] |
| 1957 | NM_000138.4(FBN1): c.2341T > | 2200 | FBN1 | [′CAGTCTCCTTTGTGACAATGGACAAYGTAGA |
| | C (p.Cys781Arg) | | | AATACTCCTGGAAGTTTTGT′] |
| 1958 | NM_000138.4(FBN1): c.4222T > | 2200 | FBN1 | [′CTTTCTGGCTGTAGACCTTGATGAGYGCTCT |
| | C (p.Cys1408Arg) | | | GAGAACCTGAATCTCTGTGG′] |
| 1959 | NM_000256.3(MYBPC3): c.1351 + | 4607 | MYBPC3 | [′GTAGCACGGAGCTCTTTGTGAAAGGYGGGC |
| | 2T > C | | | CTGGGACCTGAGGATGTGGGA′] |
| 1960 | NM_000256.3(MYBPC3): c.3392T > | 4607 | MYBPC3 | [′GACGCGGAAGTAGTAGCCATTGCCARTGAT |
| | C (p.Ile1131Thr) | | | GAGCTCTGGCACCACGCAGTG′] |
| 1961 | NM_000256.3(MYBPC3): c.821 + | 4607 | MYBPC3 | [′CCTCCTATCAGCCTTCCGCCGCACGYGAGTG |
| | 2T > C | | | GCCATCCTCAGGGCCTGGGG′] |
| 1962 | NM_000257.3(MYH7): c.1370T > | 4625 | MYH7 | [′ACCAAGCAGCCACGCCAGTACTTCAYAGGA |
| | C (p.Ile457Thr) | | | GTCCTGGACATCGCTGGCTTC′] |
| 1963 | NM_000257.3(MYH7): c.2093T > | 4625 | MYH7 | [′ATGCACCAGCTGCGCTGCAATGGTGYGCTG |
| | C (p.Val698Ala) | | | GAGGGCATCCGCATCTGCAGG′] |
| 1964 | NM_000257.3(MYH7): c.2546T > | 4625 | MYH7 | [′AAGAGTGCAGAAAGAGAGAAGGAGAYGGC |
| | C (p.Met849Thr) | | | CTCCATGAAGGAGGAGTTCACA′] |
| 1965 | NM_000257.3(MYH7): c.2555T > | 4625 | MYH7 | [′GAAAGAGAGAAGGAGATGGCCTCCAHGAA |
| | C (p.Met852Thr) | | | GGAGGAGTTCACACGCCTCAAA′] |
| 1966 | NM_000257.3(MYH7): c.602T > | 4625 | MYH7 | [′CAGTACTTTGCTGTTATTGCAGCCAYTGGGG |
| | C (p.Ile201Thr) | | | ACCGCAGCAAGAAGGACCAG′] |
| 1967 | NM_000257.3(MYH7): c.788T > | 4625 | MYH7 | [′ACAGGAAAGTTGGCATCTGCAGACAYAGAG |
| | C (p.Ile263Thr) | | | ACCTGTGAGTGCCATGAATCT′] |
| 1968 | NM_000260.3(MY07A): c.5573T > | 4647 | MY07A | [′CTCCTGCCCCACGTGCAGCGCTTCCYGCAGT |
| | C (p.Leu1858Pro) | | | CCCGAAAGCACTGCCCACTC′] |
| 1969 | NM_000441.1(SLC26A4): c.164 + | 5172 | SLC26A4 | [′GGAGAGCCTGGCCAAGTGCTGCAGGYAGCG |
| | 2T > C | | | GCCGCGCGGGCCTGCGTAGAG′] |
| 1970 | NM_000441.1(SLC26A4): c.2T > | −1 | — | [′TCGCTGTCCTCTGGCTCGCAGGTCABGGCAG |
| | C (p.Met1Thr) | | | CGCCAGGCGGCAGGTCGGAG′] |
| 1971 | NM_000441.1(SLC26A4): c.765 + | 5172 | SLC26A4 | [′AATGGAGTTCTCTCTATTATCTATGYAAGTG |
| | 2T > C | | | TTGCTTCTTGCTCCAGGGAT′] |
| 1972 | NM_000551.3(VHL): c.497T > C | 7428 | VHL | [′CTGAAAGAGCGATGCCTCCAGGTTGYCCGG |
| | (p.Val166Ala) | | | AGCCTAGTCAAGCCTGAGAAT′] |
| 1973 | NM_001399.4(EDA): c.2T > C | 1896 | EDA | [′AGAGAGTGGGTGTCTCCGGAGGCCAYGGGC |
| | (p.Met1Thr) | | | TACCCGGAGGTGGAGCGCAGG′] |
| 1974 | NM_001943.3(DSG2): c.523 + 2T > | 1829 | DSG2 | [′CTGTTGAAGAGTTGAGTGCAGCACGYAAGA |
| | C | | | GTCTTTTTTTTTTTTTTTAAT′] |
| 1975 | NM_004572.3(PKP2): c.2062T > | 5318 | PKP2 | [′TTGCGGACACTTTTGGCGATCAAGGRCAGAT |
| | C (p.Ser688Pro) | | | ACATCCTTATAACAATGGAA′] |
| 1976 | NM_005633.3(SOS1): c.1310T > | 6654 | SOS1 | [′ATTGATGGTTGGGAGGGAAAAGACABTGGA |
| | C (p.Ile437Thr) | | | CAGTGTTGTAATGAATTTATA′] |
| 1977 | NM_170707.3(LMNA): c.799T > | 4000 | LMNA | [GTATAAGAAGGAGCTGGAGAAGACTYATTC |
| | C (p.Tyr267His) | | | TGCCAAGGTGCTTGCTCTCGA′] |
| 1978 | NM_206933.2(USH2A): c.10561T > | 7399 | USH2A | [′TCTTGAAGATACAATTGTCTTAAACYGGAGA |
| | C (p.Trp3521Arg) | | | AAACCTATACAATCAAATGG′] |
| 1979 | NM_206933.2(USH2A): c.1606T > | 7399 | USH2A | [′CGACACAACAAGCCAGCCATATAGAYGCCT |
| | C (p.Cys536Arg) | | | CTGCTCCCAGGAGAGCTTCAC′] |
| 1980 | NM_206933.2(USH2A): c.5857 + | −1 | — | [′GTCGAGGACGTACAACAGGAGCAGGYAAAT |
| | 2T > C | | | ACTTATCTTCAAATGCATATG′] |
| 1981 | NM_000492.3(CFTR): c.1090T > | 1080 | CFTR | [′CTGGGCTGTACAAACATGGTATGACYCTCTT |
| | C (p.Ser364Pro) | | | GGAGCAATAAACAAAATACA′] |
| 1982 | NM_000548.3(TSC2): c.5150T > | 7249 | TSC2 | [′CCCTTCGTGGCCCGCCAGATGGCCCYGCACG |
| | C (p.Leu1717Pro) | | | CAAATGTGAGTGGGGGTGGG′] |
| 1983 | NM_000548.3 (TSC2): c.2410T > | 7249 | TSC2 | [′CCTCATCCACCGCTGTGCCAGCCAGYGCGTC |
| | C (p.Cys804Arg) | | | GTGGCCTTGTCCATCTGCAG′] |
| 1984 | NM_000548.3(TSC2): c.3106T > | 7249 | TSC2 | [′GGACATGATGGCTCGATACGTCTTCYCCAAC |
| | C (p.Ser1036Pro) | | | TTCACGGCTGTCCCGAAGAG′] |
| 1985 | NM_000212.2(ITGB3): c.2231T > | −1 | — | [′GCCGCCCTGCTCATCTGGAAACTCCYCATCA |
| | C (p.Leu744Pro) | | | CCATCCACGACCGAAAAGAA′] |
| 1986 | NM_183415.2(UBE3B): c.1741 + | 89910 | UBE3B | [′AGATGATCTGGGATGGAATTGTAGGYAAGA |
| | 2T > C | | | GAAAAGGTGTCTGCTGTTGTT] |
| 1987 | NM_005120.2(MED12): c.3493T > | 9968 | MED12 | [′CCTTTTAGCTTGTAGTGAACAGGACYCTGAG |
| | C (p.Ser1165Pro) | | | CCAGGGGCCCGGCTTACCTG′] |
| 1988 | NM_001033053.2(NLRP1): c.230T > | 22861 | NLRP1 | [′CTAGCCCTCCATACCTGGGAGCAGAYGGGG |
| | C (p.Met77Thr) | | | CTGAGGTCACTGTGCGCCCAA′] |
| 1989 | NM_025152.2(NUBPL): c.815 − | 80224 | NUBPL | [′ATGCCTATATGAACTTTTCTGGTTCYAATGG |
| | 27T > C | | | ATGTCTGCTGGGCTCTTTTA′] |
| 1990 | NM_001288953.1(TTC7A): c.2366T > | 57217 | TTC7A | [′GCGTGGCAGGGCCTGGGCGAGGTGCYGCAG |
| | C (p.Leu789Pro) | | | GCCCAGGGCCAGAACGAGGCT′] |
| 1991 | NM_014845.5(FIG4): c.524T > C | 9896 | FIG4 | [′TACAGCTATGATTTGTCCCACTCACYTCAAT |
| | (p.Leu175Pro) | | | ATAATCTCACTGTCTTGCGA′] |
| 1992 | NM_000059.3(BRCA2): c.2T > C | 675 | BRCA2 | [′ATTGGAGGAATATCGTAGGTAAAAABGCCT |
| | (p.Met1Thr) | | | ATTGGATCCAAAGAGAGGCCA′] |
| 1993 | NM_000059.3(BRCA2): c.316 + | 675 | BRCA2 | [′TAGATAAATTCAAATTAGACTTAGGYAAGT |
| | 2T > C | | | AATGCAATATGGTAGACTGGG′] |
| 1994 | NM_000059.3(BRCA2): c.67 + 2T > | 675 | BRCA2 | [′TTAAGACACGCTGCAACAAAGCAGGHATTG |
| | C | | | ACAAATTTTATATAACTTTAT′] |
| 1995 | NM_000059.3(BRCA2): c.7958T > | 675 | BRCA2 | [′AGATGCCTAAGCCCAGAAAGGGTGCYTCTT |
| | C (p.Leu2653Pro) | | | CAACTAAAATACAGGCAAGTT′] |
| 1996 | NM_000218.2(KCNQ1): c.1016T > | 3784 | KCNQ1 | [′TGCTTCTCTGTCTTTGCCATCTCCTHCTTTGC |
| | C (p.Phe339Ser) | | | GCTCCCAGCGGTAGGTGCC′] |
| | NM_000218.2(KCNQ1): c.1045T > | 3784 | KCNQ1 | [] |
| | C (p.Ser349Pro) | | | |
| | NM_000218.2(KCNQ1): c.1052T > | 3784 | KCNQ1 | [] |
| | C (p.Phe351Ser) | | | |
| | NM_000218.2(KCNQ1): c.1058T > | 3784 | KCNQ1 | [] |
| | C (p.Leu353Pro) | | | |
| | NM_000218.2(KCNQ1): c.1541T > | 3784 | KCNQ1 | [] |
| | C (p.Ile514Thr) | | | |
| | NM_000218.2(KCNQ1): c.1661T > | 3784 | KCNQ1 | [] |
| | C (p.Val554Ala) | | | |
| 1997 | NM_000218.2(KCNQ1): c.1700T > | 3784 | KCNQ1 | [′CTTCTCTCCAGGCTGGACCAGTCCABTGGGA |
| | C (p.Ile567Thr) | | | AGCCCTCACTGTTCATCTCC′] |
| | NM_000218.2(KCNQ1): c.2T > C | 3784 | KCNQ1 | [] |
| | (p.Met1Thr) | | | |
| | NM_000218.2(KCNQ1): c.341T > | 3784 | KCNQ1 | [] |
| | C (p.Leu114Pro) | | | |
| 1998 | NM_000218.2(KCNQ1): c.560T > | 3784 | KCNQ1 | [′GGCTGCCGCAGCAAGTACGTGGGCCYCTGG |
| | C (p.Leu187Pro) | | | GGGCGGCTGCGCTTTGCCCGG′] |
| | NM_000218.2(KCNQ1): c.572T > | 3784 | KCNQ1 | [] |
| | C (p.Leu191Pro) | | | |
| | NM_000218.2(KCNQ1): c.716T > | 3784 | KCNQ1 | [] |
| | C (p.Leu239Pro) | | | |
| | NM_000218.2(KCNQ1): c.752T > | 3784 | KCNQ1 | [] |
| | C (p.Leu251Pro) | | | |
| | NM_000218.2(KCNQ1): c.797T > | 3784 | KCNQ1 | [] |
| | C (p.Leu266Pro) | | | |
| | NM_000218.2(KCNQ1): c.824T > | 3784 | KCNQ1 | [] |
| | C (p.Phe275Ser) | | | |
| | NM_000218.2(KCNQ1): c.910T > | 3784 | KCNQ1 | [] |
| | C (p.Trp304Arg) | | | |
| | NM_000218.2(KCNQ1): c.913T > | 3784 | KCNQ1 | [] |
| | C (p.Trp305Arg) | | | |
| 1999 | NM_000492.3(CFTR): c.1021T > | 1080 | CFTR | [′CCTCCGGAAAATATTCACCACCATCYCATTC |
| | C (p.Ser341Pro) | | | TGCATTGTTCTGCGCATGGC′] |
| 2000 | NM_000492.3(CFTR): c.1853T > | 1080 | CFTR | [′TTAAAGAAAGCTGACAAAATATTAAYTTTG |
| | C (p.Ile618Thr) | | | CATGAAGGTAGCAGCTATTTT′] |
| 2001 | NM_000492.3(CFTR): c.2780T > | 1080 | CFTR | [′TACGTGGGAGTAGCCGACACTTTGCYTGCTA |
| | C (p.Leu927Pro) | | | TGGGATTCTTCAGAGGTCTA′] |
| 2002 | NM_000492.3(CFTR): c.3230T > | 1080 | CFTR | [′GGACGGCAGCCTTACTTTGAAACTCYGTTCC |
| | C (p.Leu1077Pro) | | | ACAAAGCTCTGAATTTACAT′] |
| 2003 | NM_007294.3(BRCA1): c.115T > | 672 | BRCA1 | [′GATCAAGGAACCTGTCTCCACAAAGNGTGA |
| | C (p.Cys39Arg) | | | CCACATATTTTGCAAGTAAGT′] |
| 2004 | NM_007294.3(BRCA1): c.190T > | 672 | BRCA1 | [′GAAAGGGCCTTCACAGTGTCCTTTABGTAAG |
| | C (p.Cys64Arg) | | | AATGATATAACCAAAAGGTA′] |
| 2005 | NM_007294.3(BRCA1): c.212 + | 672 | BRCA1 | [′ATGTAAGAATGATATAACCAAAAGGYATAT |
| | 2T > C | | | AATTTGGTAATGATGCTAGGT′] |
| 2006 | NM_007294.3(BRCA1): c.2T > C | 672 | BRCA1 | [′TAAAGTTCATTGGAACAGAAAGAAABGGAT |
| | (p.Met1Thr) | | | TTATCTGCTCTTCGCGTTGAA′] |
| 2007 | NM_007294.3(BRCA1): c.4357 + | 672 | BRCA1 | [′CAGAACAAAGCACATCAGAAAAAGGBGTGT |
| | 2T > C | | | ATTGTTGGCCAAACACTGATA′] |
| 2008 | NM_007294.3 (BRCA1): c.5291T > | 672 | BRCA1 | [′CTCTTCTTCCAGATCTTCAGGGGGCYAGAAA |
| | C (p.Leu1764Pro) | | | TCTGTTGCTATGGGCCCTTC′] |
| 2009 | NM_007294.3(BRCA1): c.65T > C | 672 | BRCA1 | [′GTCATTAATGCTATGCAGAAAATCTYAGAGT |
| | (p.Leu22Ser) | | | GTCCCATCTGGTAAGTCAGC′] |
| 2010 | NM_005236.2(ERCC4): c.689T > | 2072 | ERCC4 | [′ATGCTTGCTATACAGACTGCTATACYGGACA |
| | C (p.Leu230Pro) | | | TTTTAAATGCATGTCTAAAG′] |
| 2011 | NM_005236.2(ERCC4): c.706T > | 2072 | ERCC4 | [′TGCTATACTGGACATTTTAAATGCAYGTCTA |
| | C (p.Cys236Arg) | | | AAGGAACTAAAATGCCATAA′] |
| 2012 | NM_000435.2(NOTCH3): c.4556T > | 4854 | NOTCH3 | [′GGCGTGCTGGTGCTCACAGTGCTGCYGCCGC |
| | C (p.Leu1519Pro) | | | CAGAGGAGCTACTGCGTTCC′] |
| 2013 | NM_153704.5(TMEM67): c.1046T > | 91147 | TMEM67 | [′GGAAATTTTCTCAAGTGGCAAACTTYAGAA |
| | C (p.Leu349Ser) | | | GGAGGTGTTTTACAGGTAAGC′] |
| 2014 | NM_001142519.1(FAM111A): c. | 63901 | FAM111A | [′GTCTAAAAAAGCAGAAAGTCCAGAGYATGT |
| | 1531T > C (p.Tyr511His) | | | CCATATGTATACTCAAAGAAG′] |
| 2015 | NM_014795.3(ZEB2): c.3211T > | 9839 | ZEB2 | [′GCGCTTCTCACACTCGGGCTCGTACYCGCAG |
| | C (p.Ser1071Pro) | | | CACATGAATCACAGGTATTC′] |
| 2016 | NM_001199107.1(TBC1D24): c. | 57465 | TBC1D24 | [′CCCCTCTGCTACTTCGCCCGGGTCTYTGACG |
| | 686T > C (p.Phe229Ser) | | | TCTTCCTGGTGGAGGGCTAC′] |
| 2017 | NM_022114.3 (PRDM16): c.2660T > | 63976 | PRDM16 | [′GTGGGAGCCCTGAAGGAGAAGTACCYGCGG |
| | C (p.Leu887Pro) | | | CCGTCCCCGCTGCTCTTCCAC′] |
| 2018 | NM_001130089.1(KARS): c.517T > | 3735 | KARS | [′AGCTTCTGGGGGAAAGCTCATCTTCYATGAT |
| | C (p.Tyr173His) | | | CTTCGAGGAGAGGGGGTGAA′] |
| 2019 | NM_005689.2(ABCB6): c.1067T > | 10058 | ABCB6 | [′CTCATCTTCTCCCACCTGCACGAGCYCTCAC |
| | C (p.Leu356Pro) | | | TGCGCTGGCACCTGGGGCGC′] |
| 2020 | NM_001070.4(TUBG1): c.1160T > | 7283 | TUBG1 | [′CCCCTGTTTTCTGCACACCCCAAGCYCTTCG |
| | C (p.Leu387Pro) | | | AGAGAACCTGTCGCCAGTAT′] |
| 2021 | NM_001283009.1(RTEL1): c.3730T > | −1 | — | [′CGGGCCCCTCTCAGCAGGCTGTGTGYGCCA |
| | C (p.Cys1244Arg) | | | GGGCTGTGGGGCAGAGGACGT′] |
| 2022 | NM_001135021.1(ELMOD3): c. | 84173 | ELMOD3 | [′ATCACCCACATTGCCATCCAGGCCTYGAGA |
| | 794T > C (p.Leu265Ser) | | | GAGGAGTGTCTCTCCAGGTGA′] |
| 2023 | NM_001382.3 (DPAGT1): c.503T > | 1798 | DPAGT1 | [′CTACCATCTCTCCCCGCAGGAATCCYGTACT |
| | C (p.Leu168Pro) | | | ATGTCTACATGGGGCTGCTG′] |
| 2024 | m.10237T > C | 4537 | MT-ND3 | [′CCATAAAATTCTTCTTAGTAGCTATYACCTT |
| | | | | CTTATTATTTGATCTAGAAA′] |
| 2025 | m.11253T > C | 4538 | MT-ND4 | [′TCCCTTCCCCTACTCATCGCACTAAYTTACA |
| | | | | CTCACAACACCCTAGGCTCA′] |
| 2026 | m.12811T > C | 4540 | MT-ND5 | [′ATCCTTCTTGCTCATCAGTTGATGAYACGCC |
| | | | | CGAGCAGATGCCAACACAGC′] |
| 2027 | m.14325T > C | 4541 | MT-ND6 | [′ATTCAGCTTCCTACACTATTAAAGTYTACCA |
| | | | | CAACCACCACCCCATCATAC′] |
| 2028 | NM_000142.4(FGFR3): c.2419T > | 2261 | FGFR3 | [′ACCCAGCAGTGGGGGCTCGCGGACGNGAAG |
| | C (p.Ter807Arg) | | | GGCCACTGGTCCCCAACAATG′] |
| 2029 | NM_000370.3 (TTPA): c.548T > C | 7274 | TTPA | [′GTAGCCAAGAAGATTGCTGCTGTACYTACG |
| | (p.Leu183Pro) | | | GTAAATGTATATTTTAACTGT′] |
| 2030 | NM_000375.2(UROS): c.139T > C | 7390 | UROS | [′TGAGTTTTTGTCTCTTCCCAGTTTCYCTGAGA |
| | (p.Ser47Pro) | | | AGGTAAGGCCTGTTGTGAC′] |
| 2031 | NM_001006657.1(WDR35): c. | 57539 | WDR35 | [′TCTGGCACCATTCAGAGATACAGTCYACCTA |
| | 1592T > C (p.Leu531Pro) | | | ATGTTGGTTTGATTCAAAAA′] |
| 2032 | NM_001876.3 (CPT1A): c.1451T > | 1374 | CPT1A | [′GCAGATGCGCCGATCGTGGCCCACCYTTGG |
| | C (p.Leu484Pro) | | | GAGGTGAGTTTTCACACTTTT′] |
| 2033 | NM_004595.4(SMS): c.449T > C | 6611 | SMS | [′GACGAAGATTCACCTTATCAAAATAYAAAA |
| | (p.Ile150Thr) | | | ATTCTACACTCGAAGCAGTTT′] |
| 2034 | NM_005211.3 (C SF1R): c.2483T > | 1436 | CSF1R | [′AAGTGGATGGCCCCAGAGAGCATCTYTGAC |
| | C (p.Phe828Ser) | | | TGTGTCTACACGGTTCAGAGC′] |
| 2035 | NM_170707.3 (LMNA): c.644T > | 4000 | LMNA | [′TCCTTCCTCCAACCCTTCCAGGAGCYGCGTG |
| | C (p.Leu215Pro) | | | AGACCAAGCGCCGTCATGAG′] |
| 2036 | NM_194248.2(0T0F): c.3413T > | 9381 | OTOF | [′CCACCCTCCAACCTCTCCCAGGTGCYGTTCT |
| | C (p.Leu1138Pro) | | | GGGGCCTACGGGACCTAAAG′] |
| 2037 | NM_000540.2(RYR1): c.14762T > | 6261 | RYR1 | [TACAGGGTGGTCTTCGACATCACCTYCTTCT |
| | C (p.Phe4921Ser) | | | TCTTCGTCATCGTCATCCTG′] |
| 2038 | NM_000540.2(RYR1): c.7358T > | 6261 | RYR1 | [′GCCGGCAAGGGTGAGGCCCTGCGGAYCCGC |
| | C (p.Ile2453Thr) | | | GCCATCCTCCGCTCCCTTGTG′] |
| 2039 | NM_000540.2(RYR1): c.10817T > | | | [′GAAGTGTCAGCCGTGCTCTACTACCYGGACC |
| | C (p.Leu3606Pro) | 6261 | RYR1 | AGGTGGGTGGGGCCGGAGGG′] |
| 2040 | NM_000540.2(RYR1): c.13703T > | | | [′TTTTACACCCTGCGGTTCCTTGCCCYCTTCTT |
| | C (p.Leu4568Pro) | 6261 | RYR1 | GGCATTTGCCATCAACTTC′] |
| 2041 | NM_000540.2(RYR1): c.13949T > | | | [′CCCGCCCTGCGGTGTCTGAGCCTCCYGCATA |
| | C (p.Leu4650Pro) | 6261 | RYR1 | CACTGGTGGCCTTTCTCTGC′] |
| 2042 | NM_000540.2(RYR1): c.14378T > | | | [′GTGTGCCCACAGTCCTTCCTGTACCYGGGCT |
| | C (p.Leu4793Pro) | 6261 | RYR1 | GGTATATGGTGATGTCCCTC′] |
| 2043 | NM_015896.3(ZMYND10): c.797T > | | | [′CTCAGGGCTTAGCAGCAGGTTGTACRGGGC |
| | C (p.Leu266Pro) | 51364 | ZMYND10 | GATCCACACTTGCCCGTCCAA′] |
| 2044 | NM_018127.6(ELAC2): c.460T > | | | [′AAAATACCTCGAAGCAATCAAAATAYTTTCT |
| | C (p.Phe154Leu) | 60528 | ELAC2 | GGTCCATTGAAAGGAATAGA′] |
| 2045 | NM_199355.2(ADAMTS18): c.605T > | | | [′CCTGCGGGTCACCATCCTCACGTACYGTACA |
| | C (p.Leu202Pro) | 170692 | ADAMTS18 | AAAGGACAGCAGAGGAGAAG] |
| 2046 | NM_023110.2(FGFR1): c.494T > | | | [′TCCCCAGAAAAGATGGAAAAGAAATYGCAT |
| | C (p.Leu165Ser) | 2260 | FGFR1 | GCAGTGCCGGCTGCCAAGACA′] |
| 2047 | NM_001059.2(TACR3): c.766T > | | | [′CCATATTATCGTCATTATACTGGTGYACTGT |
| | C (p.Tyr256His) | 6870 | TACR3 | TTCCCATTGCTCATCATGGG′] |
| 2048 | NM_002055.4(GFAP): c.1070T > | | | [′TACCAGGACCTGCTCAATGTCAAGCHGGCC |
| | C (p.Leu357Pro) | 2670 | GFAP | CTGGACATCGAGATCGCCACC′] |
| 2049 | NM_002055.4(GFAP): c.1076T > | | | [′GACCTGCTCAATGTCAAGCTGGCCCYGGAC |
| | C (p.Leu359Pro) | 2670 | GFAP | ATCGAGATCGCCACCTACAGG′] |
| 2050 | NM_002055.4(GFAP): c.1096T > | | | [′GGCCCTGGACATCGAGATCGCCACCYACAG |
| | C (p.Tyr366His) | 2670 | GFAP | GAAGCTGCTAGAGGGCGAGGA′] |
| 2051 | NM_002055.4(GFAP): c.221T > C | | | [′CGGGCCAGTGAGCGGGCAGAGATGAYGGAG |
| | (p.Met74Thr) | 2670 | GFAP | CTCAATGACCGCTTTGCCAGC] |
| 2052 | NM_002055.4(GFAP): c.247T > C | | | [′GGAGCTCAATGACCGCTTTGCCAGCYACATC |
| | (p.Tyr83His) | 2670 | GFAP | GAGAAGGTTCGCTTCCTGGA′] |
| 2053 | NM_002055.4(GFAP): c.269T > C | | | [′AGCTACATCGAGAAGGTTCGCTTCCYGGAA |
| | (p.Leu90Pro) | 2670 | GFAP | CAGCAAAACAAGGCGCTGGCT′] |
| 2054 | NM_002055.4(GFAP): c.290T > C | | | [′TTCCTGGAACAGCAAAACAAGGCGCYGGCT |
| | (p.Leu97Pro) | 2670 | GFAP | GCTGAGCTGAACCAGCTGCGG′] |
| 2055 | NM_002055.4(GFAP): c.302T > C | | | [′CAAAACAAGGCGCTGGCTGCTGAGCYGAAC |
| | (p.Leu101Pro) | 2670 | GFAP | CAGCTGCGGGCCAAGGAGCCC′] |
| 2056 | NM_002055.4(GFAP): c.704T > C | | | [′GCCAAGCCAGACCTCACCGCAGCCCYGAAA |
| | (p.Leu235Pro) | 2670 | GFAP | GAGATCCGCACGCAGTATGAG′] |
| 2057 | NM_002055.4(GFAP): c.739T > C | | | [′CCGCACGCAGTATGAGGCAATGGCGYCCAG |
| | (p.Ser247Pro) | 2670 | GFAP | CAACATGCATGAAGCCGAAGA′] |
| 2058 | NM_002055.4(GFAP): c.992T > C | | | [′AGTTATCAGGAGGCGCTGGCGCGGCYGGAG |
| | (p.Leu331Pro) | 2670 | GFAP | GAAGAGGGGCAGAGCCTCAAG′] |
| 2059 | NM_005554.3(KRT6A): c.1406T > | | | [′GAGATCGCCACCTACCGCAAGCTGCBGGAG |
| | C (p.Leu469Pro) | 3853 | KRT6A | GGTGAGGAGTGCAGGTGGGTA′] |
| 2060 | NM_005554.3(KRT6A): c.521T > | 3853 | KRT6A | [′CAGATCAAGACCCTCAACAACAAGTBTGCC |
| | C (p.Phe174Ser) | | | TCCTTCATCGACAAGGTGAGC′] |
| 2061 | NM_153490.2(KRT13): c.332T > | 3860 | KRT13 | [′AATGAGAAGATCACCATGCAGAACCYCAAC |
| | C (p.Leu111Pro) | | | GACCGCCTGGCTTCCTACCTG′] |
| 2062 | NM_170707.3(LMNA): c.1619T > | 4000 | LMNA | [′CCATGTCCCCACCAGGAAGTGGCCAYGCGC |
| | C (p.Met540Thr) | | | AAGCTGGTGCGCTCAGTGACT′] |
| | NM_000218.2(KCNQ1): c.1117T > | 3784 | KCNQ1 | [] |
| | C (p.Ser373Pro) | | | |
| 2063 | NM_000218.2(KCNQ1): c.1135T > | 3784 | KCNQ1 | [′TCCCCCTGCCCGACCTCAGACCGCABGGAG |
| | C (p.Trp379Arg) | | | GTGCTATGCTGCCGAGAACCC′] |
| | NM_000218.2(KCNQ1): c.1165T > | 3784 | KCNQ1 | [] |
| | C (p.Ser389Pro) | | | |
| | NM_000218.2(KCNQ1): c.1174T > | 3784 | KCNQ1 | [] |
| | C (p.Trp392Arg) | | | |
| | NM_000218.2(KCNQ1): c.1550T > | 3784 | KCNQ1 | [] |
| | C (p.Ile517Thr) | | | |
| | NM_000218.2(KCNQ1): c.1696T > | 3784 | KCNQ1 | [] |
| | C (p.Ser566Pro) | | | |
| | NM_000218.2(KCNQ1): c.1805T > | −1 | — | [] |
| | C (p.Leu602Pro) | | | |
| | NM_000218.2(KCNQ1): c.401T > | 3784 | KCNQ1 | [] |
| | C (p.Leu134Pro) | | | |
| 2064 | NM_000218.2(KCNQ1): c.550T > | 3784 | KCNQ1 | [′CTGGTCCGCCGGCTGCCGCAGCAAGBACGT |
| | C (p.Tyr184His) | | | GGGCCTCTGGGGGCGGCTGCG′] |
| | NM_000218.2(KCNQ1): c.608T > | 3784 | KCNQ1 | [] |
| | C (p.Leu203Pro) | | | |
| | NM_000218.2(KCNQ1): c.625T > | 3784 | KCNQ1 | [] |
| | C (p.Ser209Pro) | | | |
| | NM_000218.2(KCNQ1): c.742T > | 3784 | KCNQ1 | [] |
| | C (p.Trp248Arg) | | | |
| 2065 | NM_000218.2(KCNQ1): c.749T > | 3784 | KCNQ1 | [′GACCGCCAGGGAGGCACCTGGAGGCHCCTG |
| | C (p.Leu250Pro) | | | GGCTCCGTGGTCTTCATCCAC′] |
| | NM_000218.2(KCNQ1): c.829T > | 3784 | KCNQ1 | [] |
| | C (p.Ser277Pro) | | | |
| | NM_000218.2(KCNQ1): c.832T > | 3784 | KCNQ1 | [] |
| | C (p.Tyr278His) | | | |
| | NM_000218.2(KCNQ1): c.845T > | 3784 | KCNQ1 | [] |
| | C (p.Leu282Pro) | | | |
| | NM_000218.2(KCNQ1): c.908T > | 3784 | KCNQ1 | [] |
| | C (p.Leu303Pro) | | | |
| 2066 | NM_000238.3(KCNH2): c.122T > | 3757 | KCNH2 | [′AACGCTCGGGTGGAGAACTGCGCCGBCATC |
| | C (p.Val41Ala) | | | TACTGCAACGACGGCTTCTGC′] |
| | NM_000238.3(KCNH2): c.1238T > | 3757 | KCNH2 | [] |
| | C (p.Leu413Pro) | | | |
| | NM_000238.3(KCNH2): c.1279T > | 3757 | KCNH2 | [] |
| | C (p.Tyr427His) | | | |
| | NM_000238.3 (KCNH2): c.1387T > | 3757 | KCNH2 | [] |
| | C (p.Phe463Leu) | | | |
| | NM_000238.3 (KCNH2): c.160T > | 3757 | KCNH2 | [] |
| | C (p.Tyr54His) | | | |
| 2067 | NM_000238.3 (KCNH2): c.1655T > | 3757 | KCNH2 | [′GAGTACGGCGCGGCCGTGCTGTTCTYGCTCA |
| | C (p.Leu552Ser) | | | TGTGCACCTTTGCGCTCATC′] |
| | NM_000238.3 (KCNH2): c.1691T > | 3757 | KCNH2 | [] |
| | C (p.Leu564Pro) | | | |
| | NM_000238.3 (KCNH2): c.1700T > | 3757 | KCNH2 | [] |
| | C (p.Ile567Thr) | | | |
| | NM_000238.3 (KCNH2): c.1702T > | 3757 | KCNH2 | [] |
| | C (p.Trp568Arg) | | | |
| | NM_000238.3 (KCNH2): c.1705T > | 3757 | KCNH2 | [] |
| | C (p.Tyr569His) | | | |
| | NM_000238.3 (KCNH2): c.1736T > | 3757 | KCNH2 | [] |
| | C (p.Met579Thr) | | | |
| 2068 | NM_000238.3 (KCNH2): c.1778T > | 3757 | KCNH2 | [′TGGCTGCACAACCTGGGCGACCAGANAGGC |
| | C (p.Ile593Thr) | | | AAACCCTACAACAGCAGCGGC] |
| | NM_000238.3 (KCNH2): c.1816T > | 3757 | KCNH2 | [] |
| | C (p.Ser606Pro) | | | |
| 2069 | NM_000238.3 (KCNH2): c.1879T > | 3757 | KCNH2 | [′CTTCAGCAGCCTCACCAGTGTGGGCHTCGGC |
| | C (p.Phe627Leu) | | | AACGTCTCTCCCAACACCAM |
| | NM_000238.3 (KCNH2): c.1889T > | 3757 | KCNH2 | [] |
| | C (p.Val630Ala) | | | |
| | NM_000238.3 (KCNH2): c.1945T > | 3757 | KCNH2 | [] |
| | C (p.Ser649Pro) | | | |
| | NM_000238.3 (KCNH2): c.1985T > | 3757 | KCNH2 | [] |
| | C (p.Ile662Thr) | | | |
| | NM_000238.3 (KCNH2): c.202T > | 3757 | KCNH2 | [] |
| | C (p.Phe68Leu) | | | |
| | NM_000238.3(KCNH2): c.2033T > | 3757 | KCNH2 | [] |
| | C (p.Leu678Pro) | | | |
| | NM_000238.3 (KCNH2): c.206T > | 3757 | KCNH2 | [] |
| | C (p.Leu69Pro) | | | |
| | NM_000238.3(KCNH2): c.2078T > | 3757 | KCNH2 | [] |
| | C (p.Leu693Pro) | | | |
| | NM_000238.3(KCNH2): c.2309T > | 3757 | KCNH2 | [] |
| | C (p.Val770Ala) | | | |
| 2070 | NM_000238.3 (KCNH2): c.2414T > | 3757 | KCNH2 | [′TGGCCTCCAGGGAAGAATGACATCTBTGGG |
| | C (p.Phe805Ser) | | | GAGCCTCTGAACCTGTATGCA′] |
| | NM_000238.3(KCNH2): c.2452T > | 3757 | KCNH2 | [] |
| | C (p.Ser818Pro) | | | |
| | NM_000238.3(KCNH2): c.2573T > | 3757 | KCNH2 | [] |
| | C (p.Ile858Thr) | | | |
| 2071 | NM_000238.3(KCNH2): c.257T > | 3757 | KCNH2 | [′GCTGCCGCGCAGATCGCGCAGGCACBGCTG |
| | C (p.Leu86Pro) | | | GGCGCCGAGGAGCGCAAAGTG′] |
| | NM_000238.3(KCNH2): c.260T > | 3757 | KCNH2 | [] |
| | C (p.Leu87Pro) | | | |
| | NM_000238.3(KCNH2): c.287T > | 3757 | KCNH2 | [] |
| | C (p.Ile96Thr) | | | |
| | NM_000238.3(KCNH2): c.3146T> | 3757 | KCNH2 | [] |
| | C (p.Leu1049Pro) | | | |
| | NM_000238.3(KCNH2): c.322T > | 3757 | KCNH2 | [] |
| | C (p.Cys108Arg) | | | |
| 2072 | NM_000238.3(KCNH2): c.371T > | 3757 | KCNH2 | [′AAGAACGAGGATGGGGCTGTCATCABGTTC |
| | C (p.Met124Thr) | | | ATCCTCAATTTCGAGGTGGTG′] |
| | NM_000238.3(KCNH2): c.65T > | 3757 | KCNH2 | [] |
| | C (p.Phe22Ser) | | | |
| | NM_000238.3(KCNH2): c.86T > | 3757 | KCNH2 | [] |
| | C (p.Phe29Ser) | | | |
| | NM_000238.3 (KCNH2): c.872T > | 3757 | KCNH2 | [] |
| | C (p.Met291Thr) | | | |
| | NM_000238.3(KCNH2): c.89T > | 3757 | KCNH2 | [] |
| | C (p.Ile30Thr) | | | |
| 2073 | NM_000238.3 (KCNH2): c.92T > | 3757 | KCNH2 | [′GCCCCCCTAGGCCGTAAGTTCATCABCGCCA |
| | C (p.Ile31Thr) | | | ACGCTCGGGTGGAGAACTGC′] |
| | NM_000891.2(KCNJ2): c.301T > | 3759 | KCNJ2 | [] |
| | C (p.Cys101Arg) | | | |
| | NM_000891.2(KCNJ2): c.650T > | 3759 | KCNJ2 | [] |
| | C (p.Leu217Pro) | | | |
| | NM_000335.4(SCN5A): c.1187T > | 6331 | SCN5A | [] |
| | C (p.Val396Ala) | | | |
| | NM_000335.4(SCN5A): c.1190T > | 6331 | SCN5A | [] |
| | C (p.Ile397Thr) | | | |
| | NM_000335.4(SCN5A): c.2018T > | 6331 | SCN5A | [] |
| | C (p.Leu673Pro) | | | |
| | NM_000335.4(SCN5A): c.2516T > | 6331 | SCN5A | [] |
| | C (p.Leu839Pro) | | | |
| | NM_000335.4(SCN5A): c.2551T > | 6331 | SCN5A | [] |
| | C (p.Phe851Leu) | | | |
| | NM_000335.4(SCN5A): c.2743T > | 6331 | SCN5A | [] |
| | C (p.Cys915Arg) | | | |
| | NM_000335.4(SCN5A): c.2783T > | 6331 | SCN5A | [] |
| | C (p.Leu928Pro) | | | |
| | NM_000335.4(SCN5A): c.278T > | 6331 | SCN5A | [] |
| | C (p.Phe93Ser) | | | |
| | NM_000335.4(SCN5A): c.2804T > | 6331 | SCN5A | [] |
| | C (p.Leu935Pro) | | | |
| 2074 | NM_000335.4(SCN5A): c.2944T > | 6331 | SCN5A | [′CAAGCGGACCACCTGGGATTTCTGCYGTGGT |
| | C (p.Cys982Arg) | | | CTCCTGCGGCAGCGGCCTCA′] |
| 2075 | NM_198056.2(SCN5A): c.3010T > | 6331 | SCN5A | [′TGCCGCCCAGGGCCAGCTGCCCAGCYGCAT |
| | C (p.Cys1004Arg) | | | TGCCACCCCCTACTCCCCGCC′] |
| 2076 | NM_000335.4(SCN5A): c.3679T > | 6331 | SCN5A | [′TTGTCTGCAGGCCTTCGAGGACATCYACCTA |
| | C (p.Tyr1227His) | | | GAGGAGCGGAAGACCATCAA′] |
| | NM_000335.4(SCN5A): c.3713T > | | | |
| | C (p.Leu1238Pro) | 6331 | SCN5A | [] |
| 2077 | NM_000335.4(SCN5A): c.3745T > | 6331 | SCN5A | [′TGCCGACAAGATGTTCACATATGTCYTCGTG |
| | C (p.Phe1249Leu) | | | CTGGAGATGCTGCTCAAGTG′] |
| | NM_000335.4(SCN5A): c.3929T > | 6331 | SCN5A | [] |
| | C (p.Leu1310Pro) | | | |
| | NM_000335.4(SCN5A): c.4027T > | 6331 | SCN5A | [] |
| | C (p.Phe1343Leu) | | | |
| | NM_000335.4(SCN5A): c.4028T > | 6331 | SCN5A | [] |
| | C (p.Phe1343Ser) | | | |
| | NM_000335.4(SCN5A): c.4034T > | 6331 | SCN5A | [] |
| | C (p.Leu1345Pro) | | | |
| | NM_000335.4(SCN5A): c.4046T > | 6331 | SCN5A | [] |
| | C (p.Ile1349T1ir) | | | |
| | NM_000335.4(SCN5A): c.407T > | 6331 | SCN5A | [] |
| | C (p.Leu136Pro) | | | |
| | NM_000335.4(SCN5A): c.4340T > | 6331 | SCN5A | [] |
| | C (p.Ile1447T1ir) | | | |
| 2078 | NM_000335.4(SCN5A): c.4415T > | 6331 | SCN5A | [′TTTATTGGTGTCATCATTGACAACTBCAACC |
| | C (p.Phe1472Ser) | | | AACAGAAGAAAAAGATACGT′] |
| | NM_000335.4(SCN5A): c.4453T > | 6331 | SCN5A | [] |
| | C (p.Phe1485Leu) | | | |
| | NM_198056.2(SCN5A): c.4493T > | 6331 | SCN5A | [] |
| | C (p.Met1498T1ir) | | | |
| | NM_000335.4(SCN5A): c.4742T > | 6331 | SCN5A | [] |
| | C (p.Leu1581Pro) | | | |
| | NM_000335.4(SCN5A): c.4778T > | 6331 | SCN5A | [] |
| | C (p.Phe1593Ser) | | | |
| 2079 | NM_000335.4(SCN5A): c.4952T > | 6331 | SCN5A | [′CGCACGCTGCTCTTTGCCCTCATGABGTCCC |
| | C (p.Met1651Thr) | | | TGCCTGCCCTCTTCAACATC′] |
| | NM_000335.4(SCN5A): c.5111T > | 6331 | SCN5A | [] |
| | C (p.Phe1704Ser) | | | |
| | NM_000335.4(SCN5A): c.5179T > | 6331 | SCN5A | [] |
| | C (p.Cys1727Arg) | | | |
| | NM_000335.4(SCN5A): c.544T > | 6331 | SCN5A | [] |
| | C (p.Cys182Arg) | | | |
| 2080 | NM_000335.4(SCN5A): c.5471T > | 6331 | SCN5A | [′TTTGCCGATGCCCTGTCTGAGCCACYCCGTA |
| | C (p.Leu1824Pro) | | | TCGCCAAGCCCAACCAGATA′] |
| 2081 | NM_198056.2(SCN5A): c.5624T > | 6331 | SCN5A | [′GAGATGGACGCCCTGAAGATCCAGAHGGAG |
| | C (p.Met1875Thr) | | | GAGAAGTTCATGGCAGCCAAC′] |
| 2082 | NM_000335.4(SCN5A): c.635T > | 6331 | SCN5A | [′AGATACACAACTGAATTTGTGGACCHGGGC |
| | C (p.Leu212Pro) | | | AATGTCTCAGCCTTACGCACC′] |
| | NM_000335.4(SCN5A): c.689T > | 6331 | SCN5A | [] |
| | C (p.Ile230Thr) | | | |
| | NM_198056.2(SCN5A): c.944T > | 6331 | SCN5A | [] |
| | C (p.Leu315Pro) | | | |
| 2083 | NM_177976.2(ARL6): c.272T > C | 84100 | ARL6 | [′TTACACAGAGAAGGCCAAGCTATTAYTTTTG |
| | (p.Ile91Thr) | | | TCATTGATAGTAGTGATAGA′] |
| 2084 | NM_000487.5(ARSA): c.899T > C | 410 | ARSA | [′TCCCGAGGCGGCTGCTCCGGTCTCTYGCGGT |
| | (p.Leu300Ser) | | | GTGGAAAGGGAACGACCTAC′] |
| 2085 | NM_000267.3(NF1): c.1595T > C | 4763 | NF1 | [′GAATTAATTACAGGGCTCGTCCAACYGGTCC |
| | (p.Leu532Pro) | | | CTCAGTCACACATGCCAGAG′] |
| 2086 | NM_001042492.2(NF1): c.2288T > | 4763 | NF1 | [′CTTCAGAAAAGAGTGATGGCACTGCBGAGG |
| | C (p.Leu763Pro) | | | CGCATTGAGCATCCCACTGCA′] |
| 2087 | NM_004990.3(MARS): c.1108T > | 4141 | MARS | [′CCTCACCAGAATCACCCAGGACATTYTCCAG |
| | C (p.Phe370Leu) | | | CAGTTGCTGAAACGAGGTTT′] |
| 2088 | NM_004990.3(MARS): c.1568T > | 4141 | MARS | [′TTCTATGTCTGGTTTGATGCCACTAYTGGCT |
| | C (p.Ile523Thr) | | | ATCTGTCCATCACAGCCAAC′] |
| 2089 | NM_006920.4(SCN1A): c.4729T > | −1 | — | [′GTTCATTGTGCTATTTACTGGAGAGYGTGTA |
| | C (p.Cys1577Arg) | | | CTGAAACTCATCTCTCTACG′] |
| 2090 | NM_006920.4(SCN1A): c.5113T > | −1 | — | [′TGAGACCTTTGGCAACAGCATGATCYGCCTA |
| | C (p.Cys1705Arg) | | | TTCCAAATTACAACCTCTGC′] |
| 2091 | NM_006920.4(SCN1A): c.838T > | 6323 | SCN1A | [′CAACCTGAGGAATAAATGTATACAAYGGCC |
| | C (p.Trp280Arg) | | | TCCCACCAATGCTTCCTTGGA′] |
| 2092 | NM_006920.4(5CN1A): c.269T > | 6323 | SCN1A | [′TGTTGTGTTCCTGTCTTACAGACTTYTATAGT |
| | C (p.Phe90Ser) | | | ATTGAATAAAGGGAAGGCC′] |
| 2093 | NM_006920.4(5CN1A): c.272T > | 6323 | SCN1A | [′TGTGTTCCTGTCTTACAGACTTTTAYAGTATT |
| | C (p.Ile91Thr) | | | GAATAAAGGGAAGGCCATC′] |
| 2094 | NM_006920.4(SCN1A): c.3827T > | −1 | — | [′TATTTCACCAATGCCTGGTGTTGGCYGGACT |
| | C (p.Leu1276Pro) | | | TCTTAATTGTTGATGTAGGT′] |
| 2095 | NM_006920.4(5CN1A): c.5522T > | −1 | — | [′CCAAACAAACTCCAGCTCATTGCCAYGGATT |
| | C (p.Met1841Thr) | | | TGCCCATGGTGAGTGGTGAC′] |
| 2096 | NM_006920.4(SCN1A): c.568T > | 6323 | SCN1A | [′AGATTTTACTTTCCTTCGGGATCCAYGGAAC |
| | C (p.Trp190Arg) | | | TGGCTCGATTTCACTGTCAT′] |
| 2097 | NM_002608.2(PDGFB): c.356T > | 5155 | PDGFB | [′ATAGACCGCACCAACGCCAACTTCCYGGTG |
| | C (p.Leu119Pro) | | | TGGCCGCCCTGTGTGGAGGTG′] |
| 2098 | NM_000833.4(GRIN2A): c.2T > C | 2903 | GRIN2A | [′TTGCAGGGACCGTCAGTGGCGACTAYGGGC |
| | (p.Met1Thr) | | | AGAGTGGGCTATTGGACCCTG′] |
| 2099 | NM_002474.2(MYH11): c.3791T > | 4629 | MYH11 | [′CTCCCCATCGCTGCACTTGGACTGCDGCTCC |
| | C (p.Leu1264Pro) | | | TGCACCTGCGCCTCCAGCTT′] |
| 2100 | NM_014139.2(SCN11A): c.2432T > | 11280 | SCN11A | [′CTCAACCTCTTCATTGCCTTACTGCYCAATT |
| | C (pLeu811Pro) | | | CCTTTAGCAATGAGGAAAGA′] |
| 2101 | NM_006514.3(SCN10A): c.1661T > | 6336 | SCN10A | [′GGAGTCAGGGTTGCTGGGTTGAGGARGAGG |
| | C (p.Leu554Pro) | | | GCTTCTAGGGAGGGGGCCTTG′] |
| 2102 | NM_000179.2(MSH6): c.1346T > | 2956 | MSH6 | [′CTTATTGGAGTCAGTGAACTGGGGCYGGTAT |
| | C (p.Leu449Pro) | | | TCATGAAAGGCAACTGGGCC′] |
| 2103 | NM_000179.2(MSH6): c.4001 + | 2956 | MSH6 | [′GAATCAGTCACTACGATTATTTCGGYAACTA |
| | 2T > C | | | ACTAACTATAATGGAATTAT′] |
| 2104 | NM_000249.3(MLH1): c.1745T > | 4292 | MLHI | [′GCTTCTTCCTAGGAGCCAGCACCGCYCTTTG |
| | C (p.Leu582Pro) | | | ACCTTGCCATGCTTGCCTTA′] |
| 2105 | NM_000249.3(MLH1): c.2246T > | 4292 | MLHI | [′CTGCAGCTTGCTAACCTGCCTGATCHATACA |
| | C (p.Leu749Pro) | | | AAGTCTTTGAGAGGTGTTAA′] |
| 2106 | NM_000249.3(MLH1): c.229T > C | 4292 | MLHI | [′ACAGAAAGAAGATCTGGATATTGTAYGTGA |
| | (p.Cys77Arg) | | | AAGGTTCACTACTAGTAAACT′] |
| 2107 | NM_000249.3(MLH1): c.453 + 2T > | 4292 | MLHI | [′GGCAATCAAGGGACCCAGATCACGGYAAGA |
| | C | | | ATGGTACATGGGAGAGTAAAT′] |
| 2108 | NM_000249.3(MLH1): c.739T > C | 4292 | MLHI | [′AGCCTTCAAAATGAATGGTTACATABCCAAT |
| | (p.Ser247Pro) | | | GCAAACTACTCAGTGAAGAA′] |
| 2109 | NM_000249.3(MLH1): c.790 + 2T > | 4292 | MLHI | [′GCATCTTCTTACTCTTCATCAACCGHAAGTT |
| | C | | | AAAAAGAACCACATGGGAAA′] |
| 2110 | NM_000251.2(MSH2): c.1319T > | 4436 | MSH2 | [′TTGTTGGCAGTTTTTGTGACTCCTCYTACTG |
| | C (p.Leu440Pro) | | | ATCTTCGTTCTGACTTCTCC′] |
| 2111 | NM_000251.2(MSH2): c.2005 + 2T > | 4436 | MSH2 | [′AACAGATGTTCCACATCATTACTGGYAAAA |
| | C | | | AACCTGGTTTTTGGGCTTTGT′] |
| 2112 | NM_000251.2(MSH2): c.2089T > | 4436 | MSH2 | [′GGCCCAAATTGGGTGTTTTGTGCCAYGTGAG |
| | C (p.Cys697Arg) | | | TCAGCAGAAGTGTCCATTGT′] |
| 2113 | NM_000251.2(MSH2): c.560T > C | 4436 | MSH2 | [′CCTGATAATGATCAGTTCTCCAATCBTGAGG |
| | (p.Leu187Pro) | | | CTCTCCTCATCCAGATTGGA′] |
| 2114 | NM_000251.2(MSH2): c.595T > C | 4436 | MSH2 | [′CCTCATCCAGATTGGACCAAAGGAAYGTGT |
| | (p.Cys199Arg) | | | TTTACCCGGAGGAGAGACTGC′] |
| 2115 | NM_000251.2(MSH2): c.929T > C | 4436 | MSH2 | [′TTGGATATTGCAGCAGTCAGAGCCCBTAACC |
| | (p.Leu310Pro) | | | TTTTTCAGGTAAAAAAAAAA′] |
| 2116 | NM_007294.3(BRCA1): c.134 + 2T > | 672 | BRCAI | [′AAAGTGTGACCACATATTTTGCAAGBAAGTT |
| | C | | | TGAATGTGTTATGTGGCTCC′] |
| 2117 | NM_001194998.1(CEP152): c. | 22995 | CEP152 | [′TATGAGGAAGACATCCTGACTGTACYTGGG |
| | 3149T > C (p.Leu1050Pro) | | | GTTCTTTTAAGTGATACCCAA′] |
| 2118 | NM_001271723.1(FBX038): c. | 81545 | FBX038 | [′AGGGGTGAATGTTCCTGAAATTCCTYGTATC |
| | 616T > C (p.Cys206Arg) | | | CCAATGCTAAGGCACCTTTA′] |
| 2119 | NM_014495.3(ANGPTL3): c.883T > | −1 | — | [′ACATCGAATAGATGGATCACAAAACYTCAA |
| | C (p.Phe295Leu) | | | TGAAACGTGGGAGAACTACAA′] |
| 2120 | NM_003184.3(TAF2): c.1945T > | 6873 | TAF2 | [′CTCTCATAGCGGAGCTGATACTGCCRCATAA |
| | C (p.Trp649Arg) | | | AATCAGCTTGCTCAAATTCT′] |
| 2121 | NM_000016.5(ACADM): c.233T > | 34 | ACADM | [′TTCTTCTAGTATCCAGTCCCCCTAAYTAGAA |
| | C (p.Ile78Thr) | | | GAGCCTGGGAACTTGGTTTA′] |
| 2122 | NM_000019.3(ACAT1): c.730 + 2T | 38 | ACATI | [′TTCCTGTCACAGTTACAGTAAAAGGYAGAG |
| | C | | | ATAATGTTCCAAAAAGGATGA′] |
| 2123 | NM_000143.3(FH): c.1255T > C | 2271 | FH | [′GAAGCATCCCCCAGCAGCCTGGCTGRGTGT |
| | (p.Ser419Pro) | | | AACACATTTTTAATCTTTGAG′] |
| 2124 | NM_000169.2(GLA): c.899T > C | −1 | — | [′GCTCCTTTATTCATGTCTAATGACCYCCGAC |
| | (p.Leu300Pro) | | | ACATCAGCCCTCAAGCCAAA′] |
| 2125 | NM_000202.6(IDS): c.587T > C | 3423 | IDS | [GTGCTGGATGTTCCCGAGGGCACCTYGCCTG |
| | (p.Leu196Ser) | | | ACAAACAGAGCACTGAGCAA′] |
| 2126 | NM_000252.2(MTM1): c.688T > | 4534 | MTM1 | [′TCTGACTTAACCATAGGTGCTGTCAYGGATT |
| | C (p.Trp230Arg) | | | CATCCAGAAAATAAGACGGT′] |
| 2127 | NM_000277.1(PAH): c.638T > C | 5053 | PAH | [′GAGTACAATCACATTTTTCCACTTCYTGAAA |
| | (p.Leu213Pro) | | | AGTACTGTGGCTTCCATGAA′] |
| 2128 | NM_000404.2(GLB1): c.457 + 2T > | 2720 | GLB1 | [′TTCTTCTCCGCTCCTCCGACCCAGGYAGGTT |
| | C | | | GTTACAGATGTCTTGAGAAG′] |
| 2129 | NM_000528.3(MAN2B1): c.2436 + | 4125 | MAN2B1 | [′AGAGATGGCTCGCTGGAGCTCATGGYGAGT |
| | 2T > C | | | GGGTCAGAGCCCCATCCGAGC′] |
| 2130 | NM_000531.5(OTC): c.540 + 2T > | 5009 | OTC | [′CTGGCTGATTACCTCACGCTCCAGGHTGGTT |
| | C | | | TATTTATTTGTCTTACAAAA′] |
| 2131 | NM_001005741.2(GBA): c.667T > | 2629 | GBA | [′TTCACCGCTCCATTGGTCTTGAGCCRAGTGG |
| | C (p.Trp223Arg) | | | GTGATGTCCAGGGGCTGGCA′] |
| 2132 | NM_000402.4(G6PD): c.473T > C | 2539 | G6PD | [′CGCCTCAACAGCCACATGAATGCCCYCCAC |
| | (p.Leu158Pro) | | | CTGGGGTCACAGGCCAACCGC′] |
| 2133 | NM_000402.4(G6PD): c.188T > C | −1 | — | [′CACCGATGCACCCATGATGATGAATRTGTGT |
| | (p.Ile63Thr) | | | GTATCCGACTGATGGAAGGC′] |
| 2134 | NM_006920.4(SCN1A): c.4251 + | −1 | — | [′GGGTATCTCTCTTTGCTTCAAGTTGYAAGTG |
| | 2T > C | | | AACACTATTTTCTCTGAATA′] |
| 2135 | NM_002225.3(IVD): c.465+2T > | 3712 | IVD | [′CAGAAAGAGAAGTATCTCCCGAAGGYGAGG |
| | C | | | AAATGGAAATGTAATACACGC′] |
| 2136 | NM_003494.3(DYSF): c.1284 + 2T > | 8291 | DYSF | [′GAGGTCAGCTTTGCGGGGAAAATGGYAAGG |
| | C | | | AGCAAGGGAGCAGGAGGGTTC′] |
| 2137 | NM_004006.2(DMD): c.2380 + 2T > | 1756 | DMD | [′CCCTGGTGGAACAGATGGTGAATGGYAATT |
| | C | | | ACACGAGTTGATTTAGATAAT′] |
| 2138 | NM_012463.3(ATP6V0A2): c.825 + | 23545 | ATP6V0A2 | [′ACCCGCATCCAGGATCTCTACACTGYGAGTA |
| | 2T > C | | | AGCTGGAAGTGGATTGCCTC′] |
| 2139 | NM_014795.3(ZEB2): c.73+2T > | 9839 | ZEB2 | [′AAGCCAATCCCAGGAGGAAAAACGGYAAG |
| | C | | | AAGCAGCCCGAACCAAACTTTT′] |
| 2140 | NM_016725.2(FOLR1): c.493 + 2T > | 2348 | FOLR1 | [′ACAAGGGCTGGAACTGGACTTCAGGYGAGG |
| | C | | | GCTGGGGTGGGCAGGAATGGA′] |
| 2141 | NM_000056.3(BCKDHB): c.752T > | 594 | BCKDHB | [′CCTGTTCTGTATTTAGCGGAAGAAGYCCCTA |
| | C (p.Val251Ala) | | | TAGAACCATACAACATCCCA′] |
| 2142 | NM_175053.3(KRT74): c.821T > | 121391 | KRT74 | [′TACTGCATCATACAGACACTTGAGGRACTTG |
| | C (p.Phe274Ser) | | | ATTTCTTTGTCCAGTGAGTC′] |
| 2143 | NM_003764.3(STX11): c.173T > | 8676 | STX11 | [′GACATTCAGGATGAAAACCAGCTGCYGGTG |
| | C (p.Leu58Pro) | | | GCCGACGTGAAGCGGCTGGGA′] |
| 2144 | NM_001044.4(SLC6A3): c.671T > | 6531 | SLC6A3 | [′CTCTGCAGACGTGGCGTGCTGCACCYCCACC |
| | C (p.Leu224Pro) | | | AGAGCCATGGCATCGACGAC′] |
| 2145 | NM_015662.2(IFT172): c.5179T > | −1 | — | [′CTGATGAATTTCAGCACGTCCTGGCRCACTG |
| | C (p.Cys1727Arg) | | | GGCTGTGGGAGGTCTGTGAG′] |
| 2146 | NM_015662.2(IFT172): c.4607T > | 26160 | IFT172 | [′GCGCGTGGCATAGTAATGAGCGATCRGCAG |
| | C (p.Leu1536Pro) | | | CATCGTCTTGAACTCCTCATG′] |
| 2147 | NM_014754.2(PTDSS1): c.794T > | 9791 | PTDSS1 | [′ACCGGGAAGATCAAGAGAGCTGTTCYGCAG |
| | C (p.Leu265Pro) | | | TTCACTCCTGCTAGCTGGACC′] |
| 2148 | NM_014714.3(IFT140): c.4078T > | 9742 | IFT140 | [′GGACCCCAAGGAGTCCATCAAGCAGYGTGA |
| | C (p.Cys1360Arg) | | | GCTGCTCCTGGAGGAACCAGA′] |
| 2149 | NM_000531.5(OTC): c.1005 + 2T > | 5009 | OTC | [′GAAAACAGAAAGTGGACAATCATGGYAAGC |
| | C | | | AAGAAACAAGGAATGGAGGAT′] |
| 2150 | NM_000531.5(OTC): c.1018T > C | 5009 | OTC | [′GTTGTGTCATCAGGCTGTCATGGTGYCCCTG |
| | (p.Ser340Pro) | | | CTGACAGATTACTCACCTCA′] |
| 2151 | NM_000531.5(OTC): c.1022T > C | 5009 | OTC | [′TGTCATCAGGCTGTCATGGTGTCCCYGCTGA |
| | (p.Leu341Pro) | | | CAGATTACTCACCTCAGCTC′] |
| 2152 | NM_000531.5(OTC): c.1033T > C | 5009 | OTC | [′TGTCATGGTGTCCCTGCTGACAGATBACTCA |
| | (p.Tyr345His) | | | CCTCAGCTCCAGAAGCCTAA′] |
| 2153 | NM_000531.5(OTC): c.143T > C | 5009 | OTC | [′CGTGACCTTCTCACTCTAAAAAACTYTACCG |
| | (p.Phe48Ser) | | | GAGAAGAAATTAAATATATG′] |
| 2154 | NM_000531.5(OTC): c.158T > C | 5009 | OTC | [′CTAAAAAACTTTACCGGAGAAGAAABTAAA |
| | (p.Ile53Thr) | | | TATATGCTATGGCTATCAGCA′] |
| 2155 | NM_000531.5(OTC): c.167T > C | 5009 | OTC | [′TTTACCGGAGAAGAAATTAAATATAYGCTA |
| | (p.Met56Thr) | | | TGGCTATCAGCAGATCTGAAA′] |
| 2156 | NM_000531.5(OTC): c.188T > C | 5009 | OTC | [′TATATGCTATGGCTATCAGCAGATCYGAAAT |
| | (p.Leu63Pro) | | | TTAGGATAAAACAGAAAGGA′] |
| 2157 | NM_000531.5(OTC): c.227T > C | 5009 | OTC | [′GTCCTTGATTTATAGTATTTGCCTTYATTGCA |
| | (p.Leu76Ser) | | | AGGGAAGTCCTTAGGCATG′] |
| 2158 | NM_000531.5(OTC): c.284T > C | 5009 | OTC | [′GAGAAAAGAAGTACTCGAACAAGATYGTCT |
| | (p.Leu95Ser) | | | ACAGAAACAGGTAAGTCCACT′] |
| 2159 | NM_000531.5(OTC): c.2T > C | 5009 | OTC | [′CGTCCTTTACACAATTAAAAGAAGAYGCTGT |
| | (p.Met1Thr) | | | TTAATCTGAGGATCCTGTTA′] |
| 2160 | NM_000531.5(OTC): c.386 + 2T > | 5009 | OTC | [′TGAAAGTCTCACGGACACGGCCCGGYTTGT |
| | C | | | AAATATTTTCTTCTCTCCAAA′] |
| 2161 | NM_000531.5(OTC): c.392T > C | 5009 | OTC | [′TTTTTCTTGGTTTGCCACAGTGTATYGTCTAG |
| | (p.Leu131Ser) | | | CATGGCAGATGCAGTATTG′] |
| 2162 | NM_000531.5(OTC): c.394T > C | 5009 | OTC | [′TTTCTTGGTTTGCCACAGTGTATTGYCTAGC |
| | (p.Ser132Pro) | | | ATGGCAGATGCAGTATTGGC′] |
| 2163 | NM_000531.5(OTC): c.416T > C | 5009 | OTC | [HIGTCTAGCATGGCAGATGCAGTATYGGCTC |
| | (p.Leu139Ser) | | | GAGTGTATAAACAATCAGAT′] |
| 2164 | NM_000531.5(OTC): c.443T > C | 5009 | OTC | [′GCTCGAGTGTATAAACAATCAGATTBGGAC |
| | (p.Leu148Ser) | | | ACCCTGGCTAAAGAAGCATCC′] |
| 2165 | NM_000531.5(OTC): c.476T > C | 5009 | OTC | [′CTGGCTAAAGAAGCATCCATCCCAAYTATC |
| | (p.Ile159Thr) | | | AATGGGCTGTCAGATTTGTAC′] |
| 2166 | NM_000531.5(OTC): c.479T > C | 5009 | OTC | [′GCTAAAGAAGCATCCATCCCAATTANCAAT |
| | (p.Ile160Thr) | | | GGGCTGTCAGATTTGTACCAT′] |
| 2167 | NM_000531.5(OTC): c.490T > C | 5009 | OTC | [′ATCCATCCCAATTATCAATGGGCTGYCAGAT |
| | (p.Ser164Pro) | | | TTGTACCATCCTATCCAGAT′] |
| 2168 | NM_000531.5(OTC): c.526T > C | 5009 | OTC | [′CCATCCTATCCAGATCCTGGCTGATYACCTC |
| | (p.Tyr176His) | | | ACGCTCCAGGTTGGTTTATT′] |
| 2169 | NM_000531.5(OTC): c.536T > C | 5009 | OTC | [′CAGATCCTGGCTGATTACCTCACGCYCCAGG |
| | (p.Leu179Pro) | | | TTGGTTTATTTATTTGTCTT′] |
| 2170 | NM_000531.5(OTC): c.577T > C | 5009 | OTC | [′CTCTCTGAAAGGTCTTACCCTCAGCBGGATC |
| | (p.Trp193Arg) | | | GGGGATGGGAACAATATCCT′] |
| 2171 | NM_000531.5(OTC): c.602T > C | 5009 | OTC | [′TGGATCGGGGATGGGAACAATATCCYGCAC |
| | (p.Leu201Pro) | | | TCCATCATGATGAGCGCAGCG′] |
| 2172 | NM_000531.5(OTC): c.663 + 2T > | 5009 | OTC | [′CACCTTCAGGCAGCTACTCCAAAGGYAGGG |
| | C | | | AAACTTTTTGCCTTGAAACTA′] |
| 2173 | NM_000531.5(OTC): c.779T > C | 5009 | OTC | [′GAAGCAGCGCATGGAGGCAATGTATYAATT |
| | (p.Leu260Ser) | | | ACAGACACTTGGATAAGCATG′] |
| 2174 | NM_000531.5(OTC): c.793T > C | 5009 | OTC | [′AGGCAATGTATTAATTACAGACACTYGGAT |
| | (p.Trp265Arg) | | | AAGCATGGGACAAGAAGAGGA′] |
| 2175 | NM_000531.5(OTC): c.803T > C | 5009 | OTC | [′TTAATTACAGACACTTGGATAAGCAYGGGA |
| | (p.Met268Thr) | | | CAAGAAGAGGAGAAGAAAAAG′] |
| 2176 | NM_000531.5(OTC): c.907T > C | 5009 | OTC | [′TGCCTCTGACTGGACATTTTTACACBGCTTG |
| | (p.Cys303Arg) | | | CCCAGAAAGCCAGAAGAAGT′] |
| 2177 | NM_000531.5(OTC): c.947T > C | 5009 | OTC | [′CCAGAAGAAGTGGATGATGAAGTCTYTTAT |
| | (p.Phe316Ser) | | | TCTCCTCGATCACTAGTGTTC′] |
| 2178 | NM_000322.4(PRPH2): c.637T > | 5961 | PRPH2 | [′CCTGGTGGACGGCGTCCCTTTCAGCYGCTGC |
| | C (p.Cys213Arg) | | | AATCCTAGCTCGCCACGGCC′] |
| 2179 | NM_000322.4(PRPH2): c.736T > | 5961 | PRPH2 | [′CCACCAGACGGAGGAGCTCAACCTGYGGGT |
| | C (p.Trp246Arg) | | | GCGTGGCTGCAGGGCTGCCCT′] |
| | NM_017415.2(KLHL3): c.1160T > | 26249 | KLHL3 | [] |
| | C (p.Leu387Pro) | | | |
| | NM_017415.2(KLHL3): c.1280T > | 26249 | KLHL3 | [] |
| | C (p.Met427Thr) | | | |
| 2180 | NM_003859.1(DPM1): c.742T > C | −1 | — | [′AGAGTCAATAATCCTTTCAAGAAAGRTACTA |
| | (p.Ser248Pro) | | | TTTCATTTCCTCCCAACTTG] |
| 2181 | NM_004826.3(ECEL1): c.2278T > | 9427 | ECEL1 | [′GGGTTCATGGGTGAGTCCTTGGGACRGTGG |
| | C (p.Cys760Arg) | | | AAAGCCCGGCCAAACTCCTCA′] |
| 2182 | NM_014908.3(DOLK): c.2T > C | 22845 | DOLK | [′GGCCGGAGATGGGCACTCTCGGGTCRTATCT |
| | (p.Met1Thr) | | | CTAGACCTGGGGCTTCACGG′] |
| 2183 | NM_000404.2(GLB1): c.922T > C | 2720 | GLB1 | [′TCTTTTGTTTCCTTGTAGGTACATGYTTATAG |
| | (p.Phe308Leu) | | | GTGGGACCAATTTTGCCTA′] |
| 2184 | NM_012434.4(SLC17A5): c.500T > | 26503 | SLC17A5 | [′TTAGGAGTTGGACCACTCATTGTACYCAGAG |
| | C (p.Leu167Pro) | | | CACTAGAAGGACTAGGAGAG′] |
| 2185 | NM_000211.4(ITGB2): c.1877 + | 3689 | ITGB2 | [′CCCCTCACCCTGTGGCAAGTACATGYGAGTG |
| | 2T > C | | | CAGGCGGAGCAGGCAGGGCG′] |
| 2186 | NM_006702.4(PNPLA6): c.3053T > | 10908 | PNPLA6 | [′ACCTCCATGTTCACTGGGTCTGCCTYTAACC |
| | C (p.Phe1018Ser) | | | GCAGCATCCATCGGGTCTTC′] |
| 2187 | NM_176787.4(PIGN): c.808T > C | 23556 | PIGN | [′TCTGAAGGATGACCAGCCCCATGGGRACCT |
| | (p.Ser270Pro) | | | ACAAATAAGATATAAAGAATA′] |
| 2188 | NM_001165899.1(PDE4D): c.1850T > | 5144 | PDE4D | [′CCATGTCTCCCAGAGGGGATGAACARTATA |
| | C (p.Ile617Thr) | | | GTCTATGAAGCCCACCTAGTT′] |
| 2189 | NM_005017.3(PCYT1A): c.571T > | 5130 | PCYT1A | [′CCTTCTGTCCTCTGTGTTGGAGCAARCATGC |
| | C (p.Phe191Leu) | | | CTAACTCAGAAACACATACA′] |
| 2190 | NM_000090.3(COL3A1): c.951 + | 1281 | COL3A1 | [′CAGGACTTCCTGGGGCTGCAGTGAGHATAG |
| | 6T > C (p.Gly300_Ala317del) | | | CTGCTAACATCACACAATTAC′] |
| 2191 | NM_000090.3(COL3A1): c.2022 + | 1281 | COL3A1 | [′GCACCTGGAGCTCCAGGAGGCAAGGYAGTA |
| | 2T > C (p.Gly660_Lys674del) | | | TTTCAATTTATTCTCTACCTT′] |
| 2192 | NM_000090.3(COL3A1): c.951 + | 1281 | COL3A1 | [′CGGCCAGGACTTCCTGGGGCTGCAGHGAGT |
| | 2T > C (p.Gly300_Ala317del) | | | ATAGCTGCTAACATCACACAA′] |
| 2193 | NM_000090.3(COL3A1): c.3093 + | 1281 | COL3A1 | [′CGAGATGGATCTCCTGGTGGCAAGGBATAA |
| | 2T > C (p.Gly1014_Lys1031del) | | | TAAACACATGTGCAATTGATT′] |
| 2194 | NM_000090.3(COL3A1): c.2337 + | 1281 | COL3A1 | [′CCAGCTGGCCAGCCTGGAGATAAGGYAACC |
| | 2T > C (p.Gly762_Lys779del) | | | CTTAATACTACCTGGATATAA′] |
| 2195 | NM_000090.3(COL3A1): c.1761 + | 1281 | COL3A1 | [′TTCCCCGGTCCTAAAGGAAATGATGBGAGTT |
| | 2T > C (p.Gly555_Asp587del) | | | CCTTCATTAATTTCTTCAAT′] |
| 2196 | NM_000090.3(C0L3A1): c.3039 + | 1281 | COL3A1 | [′CTGGTGAACCTGGAAGAGATGTGAGYAGCA |
| | 6T > C | | | GTTTTTATTCAACCAGCCAGG′] |
| | (p.Asp1013_Gly1014insVSSSFY | | | |
| | STSQ) | | | |
| 2197 | NM_000090.3(COL3A1): c.4399T > | 1281 | COL3A1 | [′GGACGTTGGCCCTGTTTGCTTTTTAYAAACC |
| | C (p.Ter1467Gln) | | | AAACTCTATCTGAAATCCCA′] |
| 2198 | NM_000090.3(COL3A1): c.2553 + | 1281 | COL3A1 | [′CCCCCTGGAGGTTCTGGACCTGCTGYAAGTT |
| | 2T > C (p.Gly816_Ala851del) | | | CCTTCCTCTTTCTCTGTCTA′] |
| 2199 | NM_001278503.1(STT3A): c.1877T > | 3703 | STT3A | [′TATACTCCAACTGGGGAGTTCCGTGYGGACC |
| | C (p.Val626Ala) | | | GTGAAGGTTCTCCAGTGCTG′] |
| 2200 | NM_000277.1(PAH): c.691T > C | 5053 | PAH | [′TAACATTCCCCAGCTGGAAGACGTTYCTCAG |
| | (p.Ser231Pro) | | | TTCCTGCAGAGTAAGTCCAC′] |
| 2201 | NM_007294.3(BRCA1): c.5467 + | 672 | BRCA1 | [′GGACAGAGGACAATGGCTTCCATGGBAAGG |
| | 2T > C | | | TGCCTGCATGTACCTGTGCTA′] |
| 2202 | NM_020347.3(LZTFL1): c.260T > | 54585 | LZTFL1 | [′ATACCACTTCTCAGCTTGTGCAAACRGCTGT |
| | C (p.Leu87Pro) | | | CGCAGAAGTAACACATTGGT′] |
| 2203 | NM_016381.5(TREX1): c.530T > | 11277 | TREX1 | [′CGCCAGCCACAGCCCTGGTGCCTGGYGGCA |
| | C (p.Val177Ala) | | | CACAATGGTGACCGCTACGAC′] |
| 2204 | NM_015474.3(SAMHD1): c.1106T > | 25939 | SAMHD1 | [′TTTGTGTTGATAAGCTCTACGGTGTRAAGAG |
| | C (p.Leu369Ser) | | | TTGCGAGTGTGGAACATGTC′] |
| 2205 | NM_005654.5(NR2F1): c.755T > | 7025 | NR2F1 | [′CAGATCACCGACCAGGTGTCCCTGCYACGC |
| | C (p.Leu252Pro) | | | CTCACCTGGAGCGAGCTGTTC′] |
| 2206 | NM_003638.2(ITGA8): c.2982 + 2T > | 8516 | ITGA8 | [′TGCCTATATATATTTAAAGATACTCRCTACT |
| | C | | | ATGCTTCCTTCTGGGAGTTT′] |
| 2207 | NM_000321.2(RB1): c.2663+2T > | 5925 | RB1 | [′AGGATCAGATGAAGCAGATGGAAGGYAGG |
| | C | | | AACCAGTTTTGAATGTTTTCCA′] |
| 2208 | NM_000321.2(RB1): c.1472T > C | 5925 | RB1 | [′CATATGTCTTTATTGGCGTGCGCTCYTGAGG |
| | (p.Leu491Pro) | | | TTGTAATGGCCACATATAGC′] |
| 2209 | NM_015884.3(MBTPS2): c.1391T > | 51360 | MBTPS2 | [′GCTATTGTTAATGCAGTACCCTGCTYTGCTT |
| | C (p.Phe464Ser) | | | TGGATGGACAATGGATTCTA′] |
| 2210 | NM_001739.1(CA5A): c.697T > C | 763 | CASA | [′TCGGTCAGCGGCGGGGTGGTGAGCGRGCCC |
| | (p.Ser233Pro) | | | GCGTAGGTCCAGTAATCCCAG′] |
| 2211 | NM_005051.2(QARS): c.169T > C | 5859 | QARS | [′TCCCTGAGTCGGGAGGCCAAGCCATRTAAC |
| | (p.Tyr57His) | | | AGGATCCCGGTAGCTTTGTCA′] |
| 2212 | NM_005356.4(LCK): c.1022T > C | 3932 | LCK | [′GGCATCAAGTTGACCATCAACAAACYCCTG |
| | (p.Leu341Pro) | | | GACATGGCAGCCCAAGTAAGG′] |
| 2213 | NM_021803.3(IL21): c.146T > C | 59067 | IL21 | [′TACCAAGTCATTCACATAATTTTTCRGCTGA |
| | (p.Leu49Pro) | | | TCAACAATATCTATAAGTTG′] |
| 2214 | NM_005861.3(STUB1): c.719T > | −1 | — | [′TGTGGCAAGATCAGCTTTGAGCTGAYGCGG |
| | C (p.Met240Thr) | | | GAGCCGTGCATCACGCCCAGT′] |
| 2215 | NM_032575.2(GLIS2): c.523T > C | 84662 | GLIS2 | [′TCAGAACACTTCCCATCCTCCGCAGYGTAAC |
| | (p.Cys175Arg) | | | CAGCTCTTTGAGCTCCTGCA′] |
| 2216 | NM_001101.3(ACTB): c.224T > C | 60 | ACTB | [′CTGAAGTACCCCATCGAGCACGGCAYCGTC |
| | (p.Ile75Thr) | | | ACCAACTGGGACGACATGGAG′] |
| 2217 | NM_001101.3(ACTB): c.356T > C | 60 | ACTB | [′AACCCCAAGGCCAACCGCGAGAAGAYGACC |
| | (p.Met119Thr) | | | CAGGTGAGTGGCCCGCTACCT′] |
| 2218 | NM_003401.3(XRCC4): c.127T > | 7518 | XRCC4 | [′TACACTTACTGATGGTCATTCAGCAYGGACT |
| | C (p.Trp43Arg) | | | GGGACAGGTAATACTAAAAA′] |
| 2219 | NM_000051.3(ATM): c.2638 + 2T > | 472 | ATM | [′CTGGAGAGAGCCAAAGTACCATAGGYAAAT |
| | C | | | ACATATTTACTACTTGGGATT′] |
| 2220 | NM_000535.5(PMS2): c.2T > C | 5395 | PMS2 | [′CGAGGCGGATCGGGTGTTGCATCCAHGGAG |
| | (p.Met1Thr) | | | CGAGCTGAGAGCTCGAGGTGA′] |
| 2221 | NM_015713.4(RRM2B): c.190T > | 50484 | RRM2B | [′ATGCCACGTACCTCTTCTGCTGTCCRGAAGG |
| | C (p.Trp64Arg) | | | AAGCCTGTGCCTGTTTATAC′] |
| 2222 | NM_015713.4(RRM2B): c.368T > | 50484 | RRM2B | [′CTCGATGAGAATTTGAAAGCCATAGRAACA |
| | C (p.Phe123Ser) | | | GCGAGCCTCTGGAACCTGCAC′] |
| 2223 | NM_003122.4(SPINK1): c.194 + | 6690 | SPINK1 | [′TTAAAAGAAACTCAAGTTTGTACTCRCCGAT |
| | 2T > C | | | TTTCAAAACATAACACGCAT′] |
| 2224 | NM_003122.4(SPINK1): c.160T > | 6690 | SPINK1 | [′AAACATAACACGCATTCATTGGGATRAGTAT |
| | C (p.Tyr54His) | | | TTCCATCAGTCCCACAGACA′] |
| | NM_000219.5(KCNE1): c.158T > | 3753 | KCNE1 | [] |
| | C (p.Phe53Ser) | | | |
| 2225 | NM_000219.5(KCNE1): c.176T > | 3753 | KCNE1 | [′GCGGATGTAGCTCAGCATGATGCCCRGGGT |
| | C (p.Leu59Pro) | | | GAAGAAGCCGAAGAATCCCAG′] |
| | NM_000219.5(KCNE1): c.259T > | 3753 | KCNE1 | [] |
| | C (p.Trp87Arg) | | | |
| 2226 | NM_017890.4(VPS13B): c.11119 + | 157680 | VPS13B | [′CGTTTGTAAAGCACATCTCCAAAGGYAGCG |
| | 2T > C | | | GGTTCCGTTCCTTGTAATAAT′] |
| 2227 | NM_005026.3(PIK3CD): c.1246T > | 5293 | PIK3CD | [′CACCTGCCCTGTCCTTCTGCAGGACYGCCCC |
| | C (p.Cys416Arg) | | | ATTGCCTGGGCCAACCTCAT′] |
| 2228 | NM_000271.4(NPC1): c.2054T > | 4864 | NPC1 | [′TACATTGGGTTGCCCTTGACCCTCAYTGTGA |
| | C (p.Ile685Thr) | | | TTGAAGTCATCCCGTTCCTG′] |
| 2229 | NM_002633.2(PGM1): c.1547T > | 5236 | PGM1 | [′GGGAGTGCCGGGGCCACCATTCGGCYGTAC |
| | C (p.Leu516Pro) | | | ATCGATAGCTATGAGAAGGAC′] |
| 2230 | NM_015599.2(PGM3): c.248T > C | 5238 | PGM3 | [′TTGGTTGATCCTTTGGGTGAAATGTYGGCAC |
| | (p.Leu83Ser) | | | CATCCTGGGAGGAACATGCC′] |
| 2231 | NM_002136.2(HNRNPA1): c.817T > | 3178 | HNRNPA1 | [′GAATTACAACAATCAGTCTTCAAATBTTGGA |
| | C (p.Phe273Leu) | | | CCCATGAAGGGAGGAAATTT′] |
| 2232 | NM_002136.2(HNRNPA1): c.841T > | 3178 | HNRNPA1 | [′TTTTGGACCCATGAAGGGAGGAAATYTTGG |
| | C (p.Phe281Leu) | | | AGGCAGAAGCTCTGGCCCCTA′] |
| 2233 | NM_001159287.1(TPI1): c.833T > | 7167 | TPI1 | [′GGTGGTGCTTCCCTCAAGCCCGAATYCGTGG |
| | C (p.Phe278Ser) | | | ACATCATCAATGCCAAACAA′] |
| 2234 | NM_130838.1(UBE3A): c.2T > C | 7337 | UBE3A | [′TCTGACGACATTGAAGCTAGCCGAAYGTAA |
| | (p.Met1Thr) | | | GTGTAACTTGGTTGAGACTGT′] |
| 2235 | NM_130838.1(UBE3A): c.710T > | 7337 | UBE3A | [′ATTGAAACTGCCTTTCTCAATGCACHTGTAT |
| | C (p.Leu237Pro) | | | ATTTGTCACCTAACGTGGAA′] |
| 2236 | NM_000414.3(HSD17B4): c.1547T > | 3295 | HSD17B4 | [′AGTGGAGACTGGAATCCCTTACACAYTGAT |
| | C (p.Ile516Thr) | | | CCTAACTTTGCTAGTCTAGCA′] |
| 2237 | NM_022068.3(PIEZO2): c.8215T > | 63895 | PIEZO2 | [′GTCCATTTGATCATTGTCTCTGGTGRGCGAT |
| | C (p.Ser2739Pro) | | | ATAGGAATATTAATTTGGCA′] |
| 2238 | NM_012079.5(DGAT1): c.751 + | 8694 | DGAT1 | [′GCACCTCAGGCCCACAGAGGTCCTCRCCGC |
| | 2T > C | | | GGTAGGTCAGATTGTCCGGGT′] |
| 2239 | NM_003108.3(S0X11): c.178T > | 6664 | SOX11 | [′GCCGATGAACGCGTTCATGGTATGGYCCAA |
| | C (p.Ser60Pro) | | | GATCGAACGCAGGAAGATCAT′] |
| 2240 | NM_021072.3(HCN1): c.814T > C | 348980 | HCN1 | [′TGATGTATGTATCTAATTAACCTTGRAAGTC |
| | (p.Ser272Pro) | | | GTAATAAACGCAAGAGACTG′] |
| 2241 | NM_001079867.1(PEX2): c.739T > | 5828 | PEX2 | [′CACCAGTGGCAAAGAATGCGCTCTAYGTGG |
| | C (p.Cys247Arg) | | | AGAGTGGCCCACCATGCCTCA′] |
| 2242 | NM_022552.4(DNMT3A): c.1943T > | 1788 | DNMT3A | [′CTGAATGCCCAAGTCCTTCAGCACCRGGAGC |
| | C (p.Leu648Pro) | | | CCTGCACCAGCCAGCAGACA′] |
| 2243 | NM_022552.4(DNMT3A): c.2705T > | 1788 | DNMT3A | [′CGCAAAATACTCCTTCAGCGGAGCGRAGAG |
| | C (p.Phe902Ser) | | | GTGGCGGATGACTGGCACGCT′] |
| 2244 | NM_018400.3(SCN3B): c.482T > | 55800 | SCN3B | [′GAGGAAGACCAGAAGGATGTACATCRTGAT |
| | C (p.Met161Thr) | | | TTCTGAGACCACAGAGGTGAA′] |
| 2245 | NM_000406.2(GNRHR): c.392T > | 2798 | GNRHR | [′TTCTCCATGTATGCCCCAGCCTTCAYGATGG |
| | C (p.Met131Thr) | | | TGGTGATCAGCCTGGACCGC′] |
| 2246 | NM_001030001.2(RPS29): c.149T > | 6235 | RPS29 | [′GCAGACGCCTACCTTAATGAAACCGRTATCC |
| | C (p.Ile50Thr) | | | TTCGCGTACTGACGGAAACA′] |
| 2247 | NM_177550.4(SLC13A5): c.1463T > | 284111 | SLC13A5 | [′CAGGGTACAGGGCAGCATGATGTACRGCGG |
| | C (p.Leu488Pro) | | | ATTGAGGCCGATGGAGCGAGA′] |
| 2248 | NM_004464.3(FGF5): c.520T > C | 2250 | FGF5 | [′TTTTCAAGAAAATAGCTATAATACCBATGCC |
| | (p.Tyr174His) | | | TCAGCAATACATAGAACTGA′] |
| 2249 | NM_000051.3(ATM): c.4776 + 2T > | 472 | ATM | [′AGAGGACCCTTTTCACTCTTGGAGGYAATAA |
| | C | | | AAATTTCATCATCTACTATT′] |
| 2250 | NM_002880.3(RAF1): c.1808T > | 5894 | RAF1 | [′GTGTTGGAGCAGCTCAATGGAAGACRGGAT |
| | C (p.Leu603Pro) | | | CTGAAACAAAGCCCAAGAATG′] |
| 2251 | NM_000251.2(MSH2): c.942 + 2T > | 4436 | MSH2 | [′GTCAGAGCCCTTAACCTTTTTCAGGBAAAAA |
| | C | | | AAAAAAAAAAAAAAAAAAAA′] |
| 2252 | NM_001077620.2(PRCD): c.2T > | −1 | — | [′GGGAGGGGATGGGGCAGCTGCGCCAYGTGC |
| | C (p.Met1Thr) | | | ACCACCCTTTTCCTGCTCAGC′] |
| 2253 | NM_001142800.1(EYS): c.9209T > | 346007 | EYS | [′AGCCACAAAGTTTTTATGTGGATCARTATCC |
| | C (p.Ile3070Thr) | | | TCGGAAAGAATTAGACTGTT′] |
| 2254 | NM_206933.2(USH2A): c.9751T > | 7399 | USH2A | [′TCCTAAATTGACAGGTGAAGTATGCYGTCCA |
| | C (p.Cys3251Arg) | | | GATGAACAGCACAATCGGGT′] |
| 2255 | NM_000257.3(MYH7): c.4442T > | −1 | — | [′GAGGCTCGCTCCCTCAGCACAGAGCYCTTCA |
| | C (p.Leu1481Pro) | | | AACTCAAGAACGCCTATGAG′] |
| 2256 | NM_000257.3(MYH7): c.4835T > | −1 | — | [′GAGACACGCAGCCGCAACGAGGCCCYGAGG |
| | C (p.Leu1612Pro) | | | GTGAAGAAGAAGATGGAAGGA′] |
| 2257 | NM_000257.3(MYH7): c.4937T > | −1 | — | [′GAGGCCCAGAAGCAAGTCAAGAGCCYCCAG |
| | C (p.Leu1646Pro) | | | AGCTTGTTGAAGGTACTCACC′] |
| 2258 | NM_001199138.1(NLRC4): c. | 58484 | NLRC4 | [′AATCTCATGAAGACCCCTCTCTTTGYGGTCA |
| | 1022T > C (p.Val341Ala) | | | TCACTTGTGCAATCCAGATG′] |
| 2259 | NM_000076.2(CDKN1C): c.*5 + | 1028 | CDKN1C | [′GCGCAAGAGGCTGCGGTGAGCCAAGYGAGT |
| | 2T > C | | | ACAGCGCACCTGGGGGGGCGC′] |
| 2260 | NM_003159.2(CDKL5): c.659T > | 6792 | CDKL5 | [′CCTGGAGAAAGTGAAATTGACCAACYTTTT |
| | C (p.Leu220Pro) | | | ACTATTCAGAAGGTGCTAGGA′] |
| 2261 | NM_005027.3(PEK3R2): c.1202T > | 5296 | PIK3R2 | [′CTCACCTTCTGCTCCGTTGTGGACCYCATCA |
| | C (p.Leu401Pro) | | | ATCACTACCGCCACGAGTCT′] |
| 2262 | NM_173596.2(SLC39A5): c.911T > | 283375 | SLC39A5 | [′TTCCTGCTCTTTGTGCTGGAGAACAYGCTGG |
| | C (p.Met304Thr) | | | GGCTTTTGCGGCACCGAGGG′] |
| 2263 | NM_153334.6(SCARF2): c.190T > | 91179 | SCARF2 | [′CCTTGCTGCCTCCAGCCAGCGCAGCRCGTGG |
| | C (p.Cys64Arg) | | | GCACCTGGGAGCTGCGAGCA′] |
| 2264 | NM_001288767.1(ARMC5): c.1928T > | 79798 | ARMC5 | [′GGGGCACTTGTGACCGGCCCGGCGCYGTAC |
| | C (p.Leu643Pro) | | | GGCCTGCTGACCTATGTGACC′] |
| 2265 | NM_001288767.1(ARMC5): c.1379T > | 79798 | ARMC5 | [′CGTGAGGCCATCAACCGGGCCCGACYGCGG |
| | C (p.Leu460Pro) | | | GATGCTGGTGGCTTGGATCTA′] |
| 2266 | NC_012920.1: m.9478T > C | 4514 | MT-CO3 | [′ATAATCCTATTTATTACCTCAGAAGYTTTTTT |
| | | | | CTTCGCAGGATTTTTCTGA′] |
| 2267 | NC_012920.1: m.11984T > C | 4538 | MT-ND4 | [′ACTAGTCACAGCCCTATACTCCCTCYACATA |
| | | | | TTTACCACAACACAATGGGG′] |
| 2268 | NM_014845.5(FIG4): c.50T > C | 9896 | FIG4 | [′ATCAGCTCGGTCCAGAAGCTGGTTCYGTATG |
| | (p.Leu17Pro) | | | AGACTAGAGCTGTGAGTACC′] |
| 2269 | NM_003159.2(CDKL5): c.145 + | 6792 | CDKL5 | [′TCAAGAAATTCAAGGACAGTGAAGGYAGAT |
| | 2T > C | | | ATATATATATATATATATATA′] |
| 2270 | NM_002775.4(HTRA1): c.1091T > | 5654 | HTRA1 | [′CCATCTGATAAGATTAAAAAGTTCCYCACG |
| | C (p.Leu364Pro) | | | GAGTCCCATGACCGACAGGCC′] |
| 2271 | NM_021870.2(FGG): c.1210T > C | 2266 | FGG | [′ATCTTCATAGTGGTTTTCTTCATGGRATACC |
| | (p.Ser404Pro) | | | ACCGGGTTTTCCAAGTGGCC′] |
| 2272 | NM_017617.3(NOTCH1): c.1285T > | 4851 | NOTCH1 | [′TCGAAGGAGCCCAGCGTGTTGATGCRCTTGC |
| | C (p.Cys429Arg) | | | CCGCATGCTCGCAGGGGTTG′] |
| 2273 | NM_024915.3(GRHL2): c.1192T > | 79977 | GRHL2 | [′GATGATTCAGATTGACACATACAGTYATAA |
| | C (p.Tyr398His) | | | CAATCGTAGCAATAAACCCAT′] |
| 2274 | NM_002049.3(GATA1): c.2T > C | 2623 | GATA1 | [′CGCAGGTTAATCCCCAGAGGCTCCAYGGAG |
| | (p.Met1Thr) | | | TTCCCTGGCCTGGGGTCCCTG′] |
| 2275 | NM_002049.3(GATA1): c.1240T > | 2623 | GATA1 | [′TACTGTGGTGGCTCCGCTCAGCTCAYGAGGG |
| | C (p.Ter414Arg) | | | CACAGAGCATGGCCTCCAGA′] |
| 2276 | NM_005859.4(PURA): c.299T > C | 5813 | PURA | [′GGCGCGGGCGGCAACAAGAGCCGCCYTACT |
| | (p.Leu100Pro) | | | CTCTCCATGTCAGTGGCCGTG′] |
| 2277 | NM_032374.4(APOPT1): c.353T > | 84334 | APOPT1 | [′TTCTGGGCAAACCAGAATTTGACTTYTAGTA |
| | C (p.Phe118Ser) | | | AGGTAAGTTTAAGTTTTAGA′] |
| 2278 | NM_032551.4(KISS1R): c.937T > | 84634 | KISS1R | [′TAAGACCTGGGCTCACTGCATGTCCYACAGC |
| | C (p.Tyr313His) | | | AACTCCGCGCTGAACCCGCT′] |
| 2279 | NM_017696.2(MCM9): c.1732 + | 254394 | MCM9 | [′AAAGCTTGATACGATTAGCAGAAGGYCTAT |
| | 2T > C | | | TTCATTCAGCGAATGATGCTT′] |
| 2280 | NM_003159.2(CDKL5): c.602T > | 6792 | CDKL5 | [′GACATGTGGTCGGTGGGCTGTATTCYTGGGG |
| | C (p.Leu201Pro) | | | AGCTTAGCGATGGACAGCCT′] |
| 2281 | NM_005740.2(DNAL4): c.153 + | 10126 | DNAL4 | [′GAGAAATTCTCCAACAACAACGAGGYATTG |
| | 2T > C | | | CCAGCAGTGCAGGCGGCCCCT′] |
| 2282 | NM_201631.3(TGM5): c.763T > C | 9333 | TGM5 | [′TTCAGGATGGCCACGCTGCCCGTCCRCTCCG |
| | (p.Trp255Arg) | | | CAGGGTTGGCGCCGTCTGTG′] |
| 2283 | NM_201631.3(TGM5): c.122T > C | 9333 | TGM5 | [′GCTCCGGTTCCTGAAGTACAGGGTGRGGTTG |
| | (p.Leu41Pro) | | | AAGGCCTGGCCCCGGCGAAC′] |
| 2284 | NM_001287223.1(SCN11A): c. | 11280 | SCN11A | [′TACCTTCATTCCTTCAAACTGGGACRGCGCA |
| | 3473T > C (p.Leu1158Pro) | | | CGAAGAGGCCTCAGTGCTCG′] |
| 2285 | NM_001287223.1(SCN11A): c. | 11280 | SCN11A | [′GGGCTCTACTCAGTCTTCTTCTTCAYTGTGG |
| | 1142T > C (p.Ile381Thr) | | | TCATTTTCCTGGGCTCCTTC′] |
| 2286 | NM_001302946.1(TRNT1): c.668T > | 51095 | TRNT1 | [′CATGATCCTGAGACTTTGGAAGCAAYTGCA |
| | C (p.Ile223Thr) | | | GAAAATGCAAAAGGCTTGGCT′] |
| 2287 | NM_001302946.1(TRNT1): c.497T > | 51095 | TRNT1 | [′TAATGAATAGGTTTTGATGGCACTTYATTTG |
| | C (p.Leu166Ser) | | | ACTACTTTAATGGTTATGAA′] |
| 2288 | NM_018136.4(ASPM): c.2419 + | 259266 | ASPM | [′ATAGACACCTATGGAAAGATGTGGGYAAGA |
| | 2T > C | | | AGACTGCAGAAATCTTGACAT′] |
| 2289 | NM_022455.4(NSD1): c.5885T > | 64324 | NSD1 | [′TGGGGTCTACGGACAAAAACAGATAYTAAA |
| | C (p.Ile1962Thr) | | | AAGGTTAGAAAAAGCTAAATT′] |
| 2290 | NM_022455.4(NSD1): c.5989T > | 64324 | NSD1 | [′TCAAGAACATGATATCACTAATTTCYATATG |
| | C (p.Tyr1997His) | | | CTCACCCTAGACAAAGTAAG′] |
| 2291 | NM_133433.3(NIPBL): c.7062 + | 25836 | NIPBL | [′AAAAAATATGCTGGATTCATTCATGYATGTA |
| | 2T > C | | | TTTTAACATTTTATAACCTA′] |
| 2292 | NM_000525.3(KCNJ11): c.988T > | 3767 | KCNJ11 | [′GGAGGACGGACGTTACTCTGTGGACYACTC |
| | C (p.Tyr330His) | | | CAAGTTTGGCAACACCGTCAA′] |
| 2293 | NM_004004.5(GJB2): c.107T > C | 2706 | GJB2 | [′CTCTTCATTTTTCGCATTATGATCCYCGTTGT |
| | (p.Leu36Pro) | | | GGCTGCAAAGGAGGTGTGG′] |
| 2294 | NM_130838.1(UBE3A): c.2485T > | 7337 | UBE3A | [′CTTTAATGTGCTTTTACTTCCGGAAYACTCA |
| | C (p.Tyr829His) | | | AGCAAAGAAAAACTTAAAGA′] |
| 2295 | NM_005682.6(ADGRG1): c.1460T > | 9289 | ADGRG1 | [′GCCATCTTCCTGCACTTCTCCCTGCYCACCT |
| | C (p.Leu487Pro) | | | GCCTTTCCTGGATGGGCCTC′] |
| 2296 | NM_000430.3(PAFAH1B1): c.841T > | 5048 | PAFAH1B1 | [′CCGAGAGCATGAGCATGTGGTAGAAYGCAT |
| | C (p.Cys281Arg) | | | TTCCTGGGCTCCAGAAAGCTC′] |
| 2297 | NM_001005360.2(DNM2): c.1862T > | 1785 | DNM2 | [′GTGGACAGCTGGAAGGCCTCGTTCCYCCGA |
| | C (p.Leu621Pro) | | | GCTGGCGTCTACCCCGAGAAG′] |
| 2298 | NM_178151.2(DCX): c.683T > C | 1641 | DCX | [′CTGGAGACCGGGGTTGTCAAAAAACYCTAC |
| | (p.Leu228Pro) | | | ACTCTGGATGGAAAACAGGTA′] |
| 2299 | NM_178151.2(DCX): c.641T > C | 1641 | DCX | [′TCTTTTGAGCAAGTCCTCACTGATAYCACAG |
| | (p.Ile214Thr) | | | AAGCCATCAAACTGGAGACC′] |
| 2300 | NM_178151.2(DCX): c.412T > C | 1641 | DCX | [′AGACAACTTCTTTAAAAAGGTGGAGYACAC |
| | (p.Tyr138His) | | | CAAGAATGTCAATCCCAACTG′] |
| 2301 | NM_178151.2(DCX): c.272T > C | 1641 | DCX | [′TTGCTGGCTGACCTGACGCGATCTCYGTCTG |
| | (p.Leu91Pro) | | | ACAACATCAACCTGCCTCAG′] |
| 2302 | NM_178151.2(DCX): c.128T > C | 1641 | DCX | [′TGTAGCTTCTACCGAACCAGAACCTYGCAG |
| | (p.Leu43Ser) | | | GCACTGAGTAATGAGAAGAAA′] |
| 2303 | NM_178151.2(DCX): c.2T > C | 1641 | DCX | [′AGGTCTCTGAGGTTCCACCAAAATAYGGAA |
| | (p.Met1Thr) | | | CTTGATTTTGGACACTTTGAC′] |
| 2304 | NM_000252.2(MTM1): c.260T > | 4534 | MTM1 | [′TCTTCTCTAATACTTGATGTTCCTCYGGGTGT |
| | C (p.Leu87Pro) | | | GATCTCGAGAATTGAAAAA′] |
| 2305 | NM_000252.2(MTM1): c.683T > | 4534 | MTM1 | [′AACTTTCTGACTTAACCATAGGTGCYGTCAT |
| | C (p.Leu228Pro) | | | GGATTCATCCAGAAAATAAG′] |
| 2306 | NM_000252.2(MTM1): c.958T > | 4534 | MTM1 | [′TCATAATATTCATGTTATGCGGGAAYCTTTA |
| | C (p.Ser320Pro) | | | AAAAAAGTGAAGGACATTGT′] |
| 2307 | NM_000252.2(MTM1): c.1353 + | 4534 | MTM1 | [′TGTGTGTGGCAAATGTCAAAACAGGYAAGG |
| | 2T > C | | | AATATGAGGGATGAAAATACA′] |
| 2308 | NM_000252.2(MTM1): c.1367T > | 4534 | MTM1 | [GTTTTTGTTTAGTTCCCTACAGCTTYTGAATT |
| | C (p.Phe456Ser) | | | CAATGAACAATTTTTGATT′] |
| 2309 | NM_000252.2(MTM1): c.1433T > | 4534 | MTM1 | [′CTGTATAGTTGCCGATTTGGTACTTYCTTATT |
| | C (p.Phe478Ser) | | | CAACTGTGAATCTGCTCGA′] |
| 2310 | NM_000252.2(MTM1): c.1495T > | 4534 | MTM1 | [′GGTTACAGAAAGGACTGTTTCTTTAYGGTCA |
| | C (p.Trp499Arg) | | | CTGATAAACAGTAATAAAGA′] |
| 2311 | NM_006579.2(EBP): c.310T > C | 10682 | EBP | [′TCTCTTCTTTTCTTCAGGGAAAGAGYATGCC |
| | (p.Tyr104His) | | | AAGGGAGACAGCCGATACAT′] |
| 2312 | NM_152296.4(ATP1A3): c.2270T > | 478 | ATP1A3 | [′GAGCCTGCCTGTGCCACAGGCCGCCYGATCT |
| | C (p.Leu757Pro) | | | TCGACAACCTAAAGAAGTCC′] |
| 2313 | NM_152296.4(ATP1A3): c.1250T > | 478 | ATP1A3 | [′GTGGCCCTGTCTCACATCGCTGGGCYCTGCA |
| | C (p.Leu417Pro) | | | ATCGCGCTGTCTTCAAGGGT′] |
| 2314 | NM_152296.4(ATP1A3): c.1144T > | 478 | ATP1A3 | [′GAACCGCATGACAGTCGCCCACATGYGGTT |
| | C (p.Trp382Arg) | | | TGACAACCAGATCCACGAGGC′] |
| 2315 | NM_152296.4(ATP1A3): c.1112T > | 478 | ATP1A3 | [′ATCTGCTCAGATAAGACAGGGACCCYCACT |
| | C (p.Leu371Pro) | | | CAGAACCGCATGACAGTCGCC′] |
| 2316 | NM_004963.3(GUCY2C): c.2782T > | −1 | — | [′CTTTCTGTCCTTCATTTCAGGTCCCYGTGCTG |
| | C (p.Cys928Arg) | | | CTGGAGTTGTGGGAATCAA′] |
| 2317 | NM_000109.3(DMD): c.1700T > | 1756 | DMD | [′GTTCACTGCATCTTCTTTTTCTGAARGCCATG |
| | C (p.Leu567Pro) | | | CACTAAAAAGGCACTGCAA′] |
| 2318 | NM_001543.4(NDST1): c.1918T > | 3340 | NDST1 | [′CAGCAACTACCCCAGCTCTGAGACCYTTGA |
| | C (p.Phe640Leu) | | | GGAGATCCAGTTTTTTAATGG′] |
| 2319 | NM_001999.3(FBN2): c.3740T > | 2201 | FBN2 | [′GGTGTCACAGCCTCCGTTCATTATCRTACAT |
| | C (p.Met1247Thr) | | | TCATCAATATCTGTGAAAAC′] |
| 2320 | NM_005154.4(USP8): c.2152T > | 9101 | USP8 | [′ACCTTCCAAACTGAAGCGCTCCTACYCCTCC |
| | C (p.Ser718Pro) | | | CCAGATATAACCCAGGCTAT′] |
| 2321 | NM_000734.3(CD247): c.2T > C | 919 | CD247 | [′CCTCTTTCTGAGGGAAAGGACAAGAYGAAG |
| | (p.Met1Thr) | | | TGGAAGGCGCTTTTCACCGCG′] |
| 2322 | NM_000663.4(ABAT): c.1433T > | 18 | ABAT | [′AAATCCATTCGTTTCCGTCCCACGCYGGTCT |
| | C (p.Leu478Pro) | | | TCAGGGATCACCACGCTCAC′] |
| 2323 | NM_005211.3(CSF1R): c.2717T > | 1436 | CSF1R | [′ACCCACAGACCCACCTTCCAGCAGAYCTGCT |
| | C (p.Ile906Thr) | | | CCTTCCTTCAGGAGCAGGCC′] |
| 2324 | NM_005211.3(CSF1R): c.2566T > | 1436 | CSF1R | [′CTTGGCCTTTGCAGGGCTGAATCCCYACCCT |
| | C (p.Tyr856His) | | | GGCATCCTGGTGAACAGCAA′] |
| 2325 | NM_005211.3(CSF1R): c.2480T > | 1436 | CSF1R | [′GTGAAGTGGATGGCCCCAGAGAGCAYCTTT |
| | C (p.Ile827Thr) | | | GACTGTGTCTACACGGTTCAG′] |
| 2326 | NM_005211.3(CSF1R): c.2450T > | 1436 | CSF1R | [′TGGGGACTGTCATCCCAGGCCCGCCYGCCTG |
| | C (p.Leu817Pro) | | | TGAAGTGGATGGCCCCAGAG′] |
| 2327 | NM_005211.3(CSF1R): c.1957T > | 1436 | CSF1R | [′GAACATCGTCAACCTTCTGGGAGCCYGTACC |
| | C (p.Cys653Arg) | | | CATGGAGGTAAGGGCCTTGG′] |
| 2328 | NM_005211.3(CSF1R): c.1745T > | 1436 | CSF1R | [′AAGTGGGAGTTCCCCCGGAACAACCYGCAG |
| | C (p.Leu582Pro) | | | TTTGGTGAGATGGCAGCTCAT′] |
| 2329 | NM_001563.3 (EVIPG1): c.461T > | 3617 | EVIPG1 | [′AATTCCCAGGAGCACCTGGATCTTCYCCAGC |
| | C (p.Leu154Pro) | | | AGGTGAGCCTAAACACCACA′] |
| | NM_001130823.1(DNMT1): c.1531T > | 1786 | DNMT1 | [] |
| | C (p.Tyr511His) | | | |
| 2330 | NM_152515.4(CKAP2L): c.2T > C | 150468 | CKAP2L | [′AGCAGCGGTAGGCCCGGGCCCCACCRTGAC |
| | (p.Met1Thr) | | | TCTTCAGTGACAGTTTTTCTT′] |
| 2331 | NM_170707.3(LMNA): c.1968 + | 4000 | LMNA | [′GGCAACTCCAGCCCCCGAACCCAGGNGAGT |
| | 2T > C | | | TGTCTCTGCTTTGTCTCCAAA′] |
| 2332 | NM_153818.1(PEX10): c.890T > | 5192 | PEX10 | [′AGAAACCCCCTGTGCACCCTGTGCCYGGAG |
| | C (p.Leu297Pro) | | | GAGCGCAGGCACCCAACAGCC′] |
| 2333 | NM_153818.1(PEX10): c.2T > C | 5192 | PEX10 | [′TCGGGACCACCCGAACCCGCGGCCAYGGCC |
| | (p.Met1Thr) | | | CCGGCCGCCGCCAGCCCCCCG′] |
| 2334 | NM_014305.3(TGDS): c.700T > C | 23483 | TGDS | [′AATGCTTCTACAACATCAGTAGCATRAAGG |
| | (p.Tyr234His) | | | AAGTTTCTTGTTTGAAGCCCT′] |
| 2335 | NM_000256.3(MYBPC3): c.2994 + | 4607 | MYBPC3 | [′GTGAACCTTCTCATCCCTTTCCAGGYGGGAC |
| | 2T > C | | | TGGCCCCCTTCCCTGTCCCC′] |
| 2336 | NM_000256.3(MYBPC3): c.1624 + | 4607 | MYBPC3 | [′CTCATGTGCCCCCCCAGCCAGGCTCDCCCTG |
| | 2T > C | | | CACAATGAGCTCAGCCAGCG′] |
| 2337 | NM_000257.3(MYH7): c.2207T > | 4625 | MYH7 | [′GCGGCCATCCCTGAGGGACAGTTCAHTGAT |
| | C (p.Ile736Thr) | | | AGCAGGAAGGGGGCAGAGAAG′] |
| 2338 | NM_000138.4(FBN1): c.7754T > | 2200 | FBN1 | [′TGCCAGCATGGCTGCCAGAACATCAYTGGG |
| | C (p.Ile2585Thr) | | | GGCTACAGGTGCAGCTGCCCC′] |
| 2339 | NM_000371.3(TTR): c.190T > C | 7276 | TTR | [′GGCTGCTGATGACACCTGGGAGCCAYTTGC |
| | (p.Phe64Leu) | | | CTCTGGGTAAGTTGCCAAAGA′] |
| 2340 | NM_000126.3(ETFA): c.2T > C | 2108 | ETFA | [′GAGGTTGCGGCGGAAGCGGAGACCAYGTTC |
| | (p.Met1Thr) | | | CGAGCGGCGGCTCCGGGGCAG′] |
| 2341 | NM_006493.2(CLN5): c.2T > C | 1203 | CLN5 | [′GCGGGCCGGGCGCGGGGAGGTGTCAYGCGC |
| | (p.Met1Thr) | | | CGGAACCTGCGCTTGGGGCCA′] |
| 2342 | NM_000543.4(SMPD1): c.475T > | 6609 | SMPD1 | [′CTCAGTGCTGAGCCCATCTGAGGCCYGTGGC |
| | C (p.Cys159Arg) | | | CTGCTCCTGGGCTCCACCTG′] |
| 2343 | NM_000501.3(ELN): c.889 + 2T > | 2006 | ELN | [′TTCCTGGAATTGGAGGCATCGCAGGYAACA |
| | C | | | TCTGTCCCAGCAGGGGGCGGG′] |
| 2344 | NM_000169.2(GLA): c.758T > C | −1 | — | [′TGGACATCTTTTAACCAGGAGAGAAYTGTTG |
| | (p.Ile253Thr) | | | ATGTTGCTGGACCAGGGGGT′] |
| 2345 | NM_152743.3(BRAT1): c.176T > | 221927 | BRAT1 | [′GAGCACCCCTGCCTGGTGGAGCTGCYGTCCC |
| | C (p.Leu59Pro) | | | ATGTGCTGAAAGTCCAGGAC′] |
| 2346 | NM_000152.3(GAA): c.896T > C | 2548 | GAA | [′CTCTACGGGTCTCACCCTTTCTACCBGGCGC |
| | (p.Leu299Pro) | | | TGGAGGACGGCGGGTCGGCA′] |
| 2347 | NM_015384.4(NIPBL): c.7637T > | 25836 | N1PBL | [′AATGTGTCCCAGGGTATTTTATTACYTCTCA |
| | C (p.Leu2546Pro) | | | TGTTAAAACAACATTTGAAG′] |
| 2348 | NM_005641.3(TAF6): c.212T > C | 6878 | TAF6 | [′ATTCTTTAGCTTCAAGGCGTAGTCADTGTCA |
| | (p.Ile71Thr) | | | CTGGTGGTGAGCTTCTGCCG′] |
| 2349 | NM_170707.3(LMNA): c.710T > | 4000 | LMNA | [′ATTGACAATGGGAAGCAGCGTGAGTYTGAG |
| | C (p.Phe237Ser) | | | AGCCGGCTGGCGGATGCGCTG′] |
| 2350 | NM_000527.4(LDLR): c.1468T > | 3949 | LDLR | [′GGACTGGATCCACAGCAACATCTACYGGAC |
| | C (p.Trp490Arg) | | | CGACTCTGTCCTGGGCACTGT′] |
| 2351 | NM_000081.3(LYST): c.772T > C | 1130 | LYST | [′CATGAACAATTCTCCATTTGACTTAYGTCAT |
| | (p.Cys258Arg) | | | GTTTTGTTATCTTTATTAGA′] |
| 2352 | NM_000256.3(MYBPC3): c.3796T > | 4607 | MYBPC3 | [′CTTACAGGGCGAGGCACGGTGTGAGYGCCG |
| | C (p.Cys1266Arg) | | | CCTGGAGGTGCGAGGTGAGGA′] |
| 2353 | NM_000256.3(MYBPC3): c.3713T > | 4607 | MYBPC3 | [′TTCAGCAAGCAGGGAGTGTTGACTCYGGAG |
| | C (p.Leu1238Pro) | | | ATTAGAAAGCCCTGCCCCTTT′] |
| 2354 | NM_000256.3(MYBPC3): c.3330 + | 4607 | MYBPC3 | [′CAGAAAGCCGACAAGAAGACCATGGBGAGC |
| | 2T > C | | | CCAGGGTCTGGGGTCCCCACG′] |
| 2355 | NM_000256.3(MYBPC3): c.1696T > | 4607 | MYBPC3 | [′CGCAAAGGACCAGGCGGTGTTCAAAYGTGA |
| | C (p.Cys566Arg) | | | GGTCTCAGATGAGAATGTTCG′] |
| 2356 | NM_000256.3(MYBPC3): c.1456T > | 4607 | MYBPC3 | [′ATCGGAGGAGGGGGCGCAAGTCAAABGGTG |
| | C (p.Trp486Arg) | | | AGTTCCAGAAGCACGGGGCAT′] |
| 2357 | NM_000256.3(MYBPC3): c.709T > | 4607 | MYBPC3 | [′TGCCCAGCCTGCCTTCACTGGCAGCYACCGC |
| | C (p.Tyr237His) | | | TGTGAGGTGTCCACCAAGGA′] |
| 2358 | NM_000256.3(MYBPC3): c.467T > | 4607 | MYBPC3 | [′GGAGCCCCCGATGACCCCATTGGCCYCTTCG |
| | C (p.Leu156Pro) | | | TGATGCGGCCACAGGATGGC′] |
| 2359 | NM_000257.3(MYH7): c.2723T > | 4625 | MYH7 | [′GATGCTGAGGAGCGCTGTGATCAGCYGATC |
| | C (p.Leu908Pro) | | | AAAAACAAGATTCAGCTGGAG′] |
| 2360 | NM_000257.3(MYH7): c.2479T > | 4625 | MYH7 | [′TCGGGCCTTCATGGGGGTCAAGAATYGGCC |
| | C (p.Trp827Arg) | | | CTGGATGAAGCTCTACTTCAA′] |
| 2361 | NM_000257.3(MYH7): c.1400T > | 4625 | MYH7 | [′GTCCTGGACATCGCTGGCTTCGAGAYCTTCG |
| | C (p.Ile467Thr) | | | ATGTGAGTTGGGACCCCTGG′] |
| 2362 | NM_000257.3(MYH7): c.1048T > | 4625 | MYH7 | [′CACTTCAGAGGAGAAAAACTCCATGYATAA |
| | C (p.Tyr350His) | | | GCTGACAGGCGCCATCATGCA′] |
| 2363 | NM_000257.3(MYH7): c.730T > | 4625 | MYH7 | [′CGTCCGGAACGACAACTCCTCCCGCYTCGTG |
| | C (p.Phe244Leu) | | | AGTGGTCCCTGACCTTGGCC′] |
| 2364 | NM_005159.4(ACTC1): c.755T > | −1 | — | [′CTGCCTGATGGCCAAGTCATCACTAYTGGCA |
| | C (p.Ile252Thr) | | | ATGAGCGCTTCCGCTGTCCT′] |
| 2365 | NM_030662.3(MAP2K2): c.169T > | 5605 | MAP2K2 | [′GCAGCAGAAGAAGCGGCTGGAAGCCNTTCT |
| | C (p.Phe57Leu) | | | CACCCAGAAAGCCAAGGTCGG′] |
| 2366 | NM_000169.2(GLA): c.41T > C | −1 | — | [′CCAGAACTACATCTGGGCTGCGCGCYTGCG |
| | (p.Leu14Pro) | | | CTTCGCTTCCTGGCCCTCGTT′] |
| 2367 | NM_002294.2(LAMP2): c.864 + | 3920 | LAMP2 | [′TATCTAGACTTTGTCTTTGCTGTGGYGAGTA |
| | 2T > C | | | ACAGATTTTTTAAAGTTAGG′] |
| 2368 | NM_000551.3(VHL): c.227T > C | 7428 | VHL | [′TCGCGCGAGCCCTCCCAGGTCATCTYCTGCA |
| | (p.Phe76Ser) | | | ATCGCAGTCCGCGCGTCGTG′] |
| 2369 | NM_000551.3(VHL): c.266T > C | 7428 | VHL | [′CCGCGCGTCGTGCTGCCCGTATGGCHCAACT |
| | (p.Leu89Pro) | | | TCGACGGCGAGCCGCAGCCC′] |
| 2370 | NM_000551.3(VHL): c.473T > C | 7428 | VHL | [′GTTTTTGCCCTTCCAGTGTATACTCHGAAAG |
| | (p.Leu158Pro) | | | AGCGATGCCTCCAGGTTGTC′] |
| 2371 | NM_000051.3(ATM): c.8584 + 2T > | −1 | — | [′GCAGTGTAGCTACTTCTTCTATTGGYAATCT |
| | C | | | TCTTGTACATATAGTAGATT′] |
| 2372 | NM_058216.2(RAD51C): c.404 + | 5889 | RAD51C | [′AGGTGTTGGAAAAACACAATTATGGYAAAA |
| | 2T > C | | | TAAAGTGTTCTCCTTTTAAGG′] |
| 2373 | NM_000455.4(STK11): c.545T > | 6794 | STK11 | [′CACAAGGACATCAAGCCGGGGAACCYGCTG |
| | C (p.Leu182Pro) | | | CTCACCACCGGTGGCACCCTC′] |
| 2374 | NM_001199107.1(TBC1D24): c. | 57465 | TBC1D24 | [′GGACAACACGCAGGTGCCCAGCTACYGCCT |
| | 313T > C (p.Cys105Arg) | | | GAATGCACGCGGCGAGGGGGC′] |
| 2375 | NM_000899.4(KITLG): c.98T > C | 4254 | KITLG | [′ACTGAAGGGATCTGCAGGAATCGTGYGACT |
| | (p.Val33Ala) | | | AATAATGTAAAAGACGTCACT′] |
| 2376 | NM_001195129.1(PRSS56): c.1183T > | 646960 | PRSS56 | [′GCAGTGCCTGCAGCGCCGGCGGCGAYGCGG |
| | C (p.Cys395Arg) | | | TCAGTTCTGTTCACCCGGACC′] |
| 2377 | NM_006888.4(CALM1): c.268T > | 801 | CALM1 | [′TAGTGAAGAAGAAATCCGTGAGGCAYTCCG |
| | C (p.Phe90Leu) | | | AGTCTTTGACAAGGTAATCCA′] |
| 2378 | NM_017534.5(MYH2): c.5609T > | −1 | — | [′GAAGATAGAAAGAATATTCTCAGGCYTCAA |
| | C (p.Leu1870Pro) | | | GATTTGGTAGATAAACTTCAG′] |
| 2379 | NM_003000.2(SDHB): c.574T > C | 6390 | SDHB | [′CTACGAGTGCATTCTCTGTGCCTGCYGTAGC |
| | (p.Cys192Arg) | | | ACCAGCTGCCCCAGCTACTG′] |
| 2380 | NM_000314.6(PTEN): c.406T > C | 5728 | PTEN | [′AAAGGGACGAACTGGTGTAATGATAYGTGC |
| | (p.Cys136Arg) | | | ATATTTATTACATCGGGGCAA′] |
| 2381 | NM_000051.3(ATM): c.2T > C | 472 | ATM | [′ATGTGTGTTCTGAAATTGTGAACCAYGAGTC |
| | (p.Met1Thr) | | | TAGTACTTAATGATCTGCTT′] |
| 2382 | NM_052867.2(NALCN): c.1526T > | 259232 | NALCN | [′GGTCCTGGAAAAAAGCTTGGGAGTTYGGTT |
| | C (p.Leu509Ser) | | | GTATTTACTGCCAGCCTCTTG′] |
| 2383 | NM_000314.6(PTEN): c.545T > C | 5728 | PTEN | [′TATGTGTATTATTATAGCTACCTGTYAAAGA |
| | (p.Leu182Ser) | | | ATCATCTGGATTATAGACCA′] |
| 2384 | NM_005957.4(MTHFR): c.1969T > | 4524 | MTHFR | [′ACGCAGGGCGTCAGGACGCAGGGTCRTGGA |
| | C (p.Ter657Arg) | | | GCCTCCGTTTCTCTCGCATTC′] |
| 2385 | NM_005957.4(MTHFR): c.1883T > | 4524 | MTHFR | [′AACCTGGTGGACAATGACTTCCCACYGGAC |
| | C (p.Leu628Pro) | | | AACTGCCTCTGGCAGGTGGTG′] |
| 2386 | NM_005957.4(MTHFR): c.1793T > | 4524 | MTHFR | [′CTGTGGATTGAGCGGTGGGGAAAGCYGTAT |
| | C (p.Leu598Pro) | | | GAGGAGGAGTCCCCGTCCCGC′] |
| 2387 | NM_005957.4(MTHFR): c.1530 + | 4524 | MTHFR | [′AGCGGGGGCTATGTCTTCCAGAAGGYGTGG |
| | 2T > C | | | TAGGGAGGCACGGGGTGCCCC′] |
| 2388 | NM_005957.4(MTHFR): c.388T > | 4524 | MTHFR | [′CCTGGAGACCATCCTGCACATGACCYGCTGC |
| | C (p.Cys130Arg) | | | CGTCAGCGCCTGGAGGAGAT′] |
| 2389 | NM_000264.3(PTCH1): c.3168 + | 5727 | PTCH1 | [′AACCCCTGGACGGCCGGGATCATTGYGAGT |
| | 2T > C | | | GTATTATAAGGGGCTTTGTGG′] |
| 2390 | NM_000030.2(AGXT): c.302T > C | 189 | AGXT | [′GTGCTGGAGCCTGGGGACTCCTTCCYGGTTG |
| | (p.Leu101Pro) | | | GGGCCAATGGCATTTGGGGG′] |
| 2391 | NM_000030.2(AGXT): c.322T > C | 189 | AGXT | [′CTTCCTGGTTGGGGCCAATGGCATTYGGGGG |
| | (p.Trp108Arg) | | | CAGCGAGCCGTGGACATCGG′] |
| 2392 | NM_000023.2(SGCA): c.371T > C | 6442 | SGCA | [′ACTCGGCAGAGGCTGGTGCTGGAGAYTGGG |
| | (p.Ile124Thr) | | | GACCCAGAAGGTACCTCTAGC′] |
| 2393 | NM_016035.4(COQ4): c.155T > C | 51117 | COQ4 | [′CGCCATCGCCGCGGAGCCGGCGGCCRACAG |
| | (p.Leu52Ser) | | | CCCTTTCTGCAGCGGGGAGGT′] |
| 2394 | NM_000510.2(FSHB): c.298T > C | 2488 | FSHB | [′GTATACATACCCAGTGGCCACCCAGYGTCA |
| | (p.Cys100Arg) | | | CTGTGGCAAGTGTGACAGCGA′] |
| 2395 | NM_007374.2(SIX6): c.110T > C | 4990 | SIX6 | [′CGCCTGGGTCGCTTCCTCTGGTCGCYGCCCG |
| | (p.Leu37Pro) | | | TGGCCCCTGCGGCCTGCGAG′] |
| 2396 | NM_000314.6(PTEN): c.202T > C | 5728 | PTEN | [′AAAGCATAAAAACCATTACAAGATAHACAA |
| | (p.Tyr68His) | | | TCTGTAAGTATGTTTTCTTAT′] |
| 2397 | NM_001103.3(ACTN2): c.683T > | 88 | ACTN2 | [′GAGAAGCACCTGGATATTCCTAAAAYGTTG |
| | C (p.Met228Thr) | | | GATGCTGAAGGTGAGATGAAA′] |
| 2398 | NM_005249.4(FOXG1): c.700T > | 2290 | FOXG1 | [′GCAGAACTCCATCCGCCACAATCTGYCCCTC |
| | C (p.Ser234Pro) | | | AACAAGTGCTTCGTGAAGGT′] |
| 2399 | NM_001165963.1(SCN1A): c.4055T > | −1 | — | [′ATTCCATCCATCATGAATGTGCTTCYGGTTT |
| | C (p.Leu1352Pro) | | | GTCTTATATTCTGGCTAATT′] |
| 2400 | NM_001165963.1(SCN1A): c.2690T > | 6323 | SCN1A | [′GCTCTGGGAAATTTAACCCTCGTCTYGGCCA |
| | C (p.Leu897Ser) | | | TCATCGTCTTCATTTTTGCC′] |
| 2401 | NM_001165963.1(SCN1A): c.1265T > | 6323 | SCN1A | [′CTAATAAATTTGATCCTGGCTGTGGHGGCCA |
| | C (p.Val422Ala) | | | TGGCCTACGAGGAACAGAAT′] |
| 2402 | NM_001165963.1(SCN1A): c.1033T > | 6323 | SCN1A | [′TTTCTTTTACCCCACTTGCAGCCAAYGTCCA |
| | C (p.Cys345Arg) | | | GAGGGATATATGTGTGTGAA′] |
| 2403 | NM_001165963.1(SCN1A): c.769T > | 6323 | SCN1A | [′AGATGTAATGATCCTGACTGTGTTCYGTCTG |
| | C (p.Cys257Arg) | | | AGCGTATTTGCTCTAATTGG′] |
| 2404 | NM_001165963.1(SCN1A): c.323T > | 6323 | SCN1A | [′TTCCGGTTCAGTGCCACCTCTGCCCYGTACA |
| | C (p.Leu108Pro) | | | TTTTAACTCCCTTCAATCCT′] |
| 2405 | NM_000426.3(LAMA2): c.8282T > | 3908 | LAMA2 | [′GCAGAATCAGAACCAGCTCTTTTGAYAGGG |
| | C (p.Ile2761Thr) | | | AGCAAGCAGTTCGGGCTTTCA′] |
| 2406 | NM_001199.3(BMP1): c.*241T > | 649 | BMP1 | [′GTCTGTGACATTTCCTGTTGTGAAGYAAAAG |
| | C | | | AGGGACCCCTGCGTCCTGCT′] |
| 2407 | NM_001987.4(ETV6): c.1046T > | 2120 | ETV6 | [′CTTTGGGATTACGTCTATCAGTTGCYTTCTG |
| | C (p.Leu349Pro) | | | ACAGCCGGTACGAAAACTTC′] |
| 2408 | NM_004974.3(KCNA2): c.788T > | 3737 | KCNA2 | [′ATGAACATCATTGACATTGTGGCCAYCATCC |
| | C (p.Ile263Thr) | | | CCTACTTCATCACCCTGGGG′] |
| 2409 | NM_002055.4(GFAP): c.791T > C | 2670 | GFAP | [′GTGTCCCCCACCTAGTTTGCAGACCYGACAG |
| | (p.Leu264Pro) | | | ACGCTGCTGCCCGCAACGCG′] |
| 2410 | NM_002055.4(GFAP): c.239T > C | 2670 | GFAP | [′GAGATGATGGAGCTCAATGACCGCTYTGCC |
| | (p.Phe80Ser) | | | AGCTACATCGAGAAGGTTCGC′] |
| 2411 | NM_002055.4(GFAP): c.218T > C | 2670 | GFAP | [′ACCCGGGCCAGTGAGCGGGCAGAGADGATG |
| | (p.Met73Thr) | | | GAGCTCAATGACCGCTTTGCC′] |
| 2412 | NM_001288953.1(TTC7A): c.1912T > | 57217 | TTC7A | [′TTTGCCTGATGCCCATGATGCAGACYCTGGT |
| | C (p.Ser638Pro) | | | AAGAACGAGCTCCTTGGGCC′] |
| 2413 | NM_000257.3(MYH7): c.5117T > | −1 | — | [′TCCCGGAAGCTGGCGGAGCAGGAGCYGATT |
| | C (p.Leu1706Pro) | | | GAGACTAGTGAGCGGGTGCAG′] |
| 2414 | NM_000257.3(MYH7): c.4772T > | −1 | — | [′ATGGAACAGGCCAAGCGCAACCACCWGCG |
| | C (p.Leu1591Pro) | | | GGTGGTGGACTCGCTGCAGACC′] |
| 2415 | NM_016218.2(POLK): c.609T > C | 51426 | POLK | [′TGAGTCTTGATGAAGCCTACTTGAAYATAAC |
| | (p.Asn203=) | | | AAAGCACTTAGAAGAAAGAC′] |
| 2416 | NM_016218.2(POLK): c.*66T > C | 51426 | POLK | [′TATTTTATAATCAATGAATTTGTTCYTTCTGA |
| | | | | TTTTAAGTTTGCAGATTTA′] |
| 2417 | NM_015662.2(1FT172): c.770T > | 26160 | 1FT172 | [′AGTCCTGGGGGCCAGTCTGTTGTGCYAGGA |
| | C (p.Leu257Pro) | | | AGTTATGACAGGTAAGTCCCC′] |
| 2418 | NM_178454.4(DRAM2): c.79T > | 128338 | DRAM2 | [′GACATCTGCTGCTTTCATATTTTCAYACATT |
| | C (p.Tyr27His) | | | ACTGCAGTAACACTCCACCA′] |
| 2419 | NM_032790.3(ORAI1): c.581T > | 84876 | ORAI1 | [′CTCTTCCTAGCTGAGGTGGTGCTGCYCTGCT |
| | C (p.Leu194Pro) | | | GGGTCAAGTTCTTGCCCCTC′] |
| 2420 | NM_001135669.1(XPR1): c.434T > | 9213 | XPR1 | [′GAGTTCTACCTCAGTCTAATCCTGCYGCAGA |
| | C (p.Leu145Pro) | | | ACTATCAGGTACTTAGATTC′] |
| 2421 | NM_001135669.1(XPR1): c.419T > | 9213 | XPR1 | [′AAACTGGCCTTCAGTGAGTTCTACCYCAGTC |
| | C (p.Leu140Pro) | | | TAATCCTGCTGCAGAACTAT′] |
| 2422 | NM_001135669.1(XPR1): c.653T > | 9213 | XPR1 | [′GACAGACAAAAGGCTATGAAGCGTTYACGT |
| | C (p.Leu218Ser) | | | GTCCCCCCTTTGGGAGCTGCT′] |
| 2423 | NM_005859.4(PURA): c.218T > C | 5813 | PURA | [CGGGTGGACATCCAGAACAAGCGCTYCTAC |
| | (p.Phe73Ser) | | | CTGGACGTGAAGCAGAACGCC′] |
| 2424 | NM_005859.4(PURA): c.563T > C | 5813 | PURA | [′CTGGGCTCCACGCAGGGCCAGACCAYTGCG |
| | (p.Ile 188Thr) | | | CTGCCCGCGCAGGGGCTCATC′] |
| 2425 | NM_001399.4(EDA): c.396+2T > | 1896 | EDA | [′TCTGACTCCCAGGACGGGCACCAGGKGAGT |
| | C | | | CACCTAGTAGGGGCGGCGGCG′] |
| 2426 | NM_001848.2(COL6A1): c.957 + | 1291 | COL6A1 | [′TCCAGGGGACCCAAGGGCTACAAGGYGAGC |
| | 2T > C | | | GTGGGCTGCTGGGAGGGGGGA′] |
| 2427 | NM_000454.4(SOD1): c.341T > C | 6647 | SOD1 | [′TCACTCTCAGGAGACCATTGCATCAYTGGCC |
| | (p.Ile114Thr) | | | GCACACTGGTGGTAAGTTTT′] |
| 2428 | NM_020451.2(SEPN1): c.872 + 2T > | 57190 | SEPN1 | [′CTTCTACTACACTGTGATGTTCCGGYGAGTG |
| | C | | | GGCCACACTGGCTGGCCTGG′] |
| 2429 | NM_004453.3 (ETFDH): c.1001T > | 2110 | ETFDH | [′GGTCTAGACTATCAGAATCCATACCYGAGTC |
| | C (p.Leu334Pro) | | | CATTTAGAGAGTTCCAAAGG′] |
| 2430 | NM_198056.2(SCN5A): c.4299 + | 6331 | SCN5A | [′CAGCTGTGGACTCCAGGGGGGTAGGYTGCC |
| | 6T > C | | | ACAGTGGCTTCTTCCACCAAG′] |
| 2431 | NM_198056.2(SCN5A): c.2291T > | 6331 | SCN5A | [′TTCACAGGGATTTTCACAGCAGAGABGACCT |
| | C (p.Met764Thr) | | | TCAAGATCATTGCCCTCGAC′] |
| 2432 | NM_198056.2(SCN5A): c.2047T > | 6331 | SCN5A | [′AGAGTTAGAGGAGTCTCGCCACAAGBGTCC |
| | C (p.Cys683Arg) | | | ACCATGCTGGAACCGTCTCGC′] |
| 2433 | NM_004415.2(DSP): c.4961T > C | 1832 | DSP | [′GAAAAGCAGAGGACCCAGGAAGAGCYGAG |
| | (p.Leu1654Pro) | | | GAGGCTCTCTTCTGAGGTCGAG′] |
| 2434 | NM_000238.3(KCNH2): c.2396T > | 3757 | KCNH2 | [′CGGGGCGACGTCGTCGTGGCCATCCYGGGT |
| | C (p.Leu799Pro) | | | ATGGGGTGGGGGGCGGGCACT′] |
| 2435 | NM_000238.3(KCNH2): c.2366T > | 3757 | KCNH2 | [′TTCATCTCCCGGGGCTCCATCGAGAYCCTGC |
| | C (p.Ile789Thr) | | | GGGGCGACGTCGTCGTGGCC′] |
| 2436 | NM_000238.3(KCNH2): c.1945 + | 3757 | KCNH2 | [′CTGCGTCATGCTCATTGGCTGTGAGYGTGCC |
| | 6T > C | | | CAGGGGCGGGCGGCGGGGAG′] |
| 2437 | NM_000238.3(KCNH2): c.1918T > | 3757 | KCNH2 | [′TCCCAACACCAACTCAGAGAAGATCBTCTCC |
| | C (p.Phe640Leu) | | | ATCTGCGTCATGCTCATTGG′] |
| 2438 | NM_000238.3(KCNH2): c.1282T > | 3757 | KCNH2 | [′CTACACGGCTGTCTTCACACCCTACYCGGCT |
| | C (p.Ser428Pro) | | | GCCTTCCTGCTGAAGGAGAC′] |
| 2439 | NM_000238.3(KCNH2): c.125T > | 3757 | KCNH2 | [′GCTCGGGTGGAGAACTGCGCCGTCAHCTAC |
| | C (p.Ile42Thr) | | | TGCAACGACGGCTTCTGCGAG′] |
| 2440 | NM_000218.2(KCNQ1): c.1025T > | 3784 | KCNQ1 | [′GTCTTTGCCATCTCCTTCTTTGCGCYCCCAGC |
| | C (p.Leu342Pro) | | | GGTAGGTGCCCCGTGGGTG′] |
| 2441 | NM_000218.2(KCNQ1): c.1251 + | 3784 | KCNQ1 | [′CCCAAACCCAAGAAGTCTGTGGTGGYGAGT |
| | 2T > C | | | AGCCCACCTGCCACCAGGGCA′] |
| 2442 | NM_130799.2(MEN1): c.547T > C | 4221 | MEN1 | [′CCTCGCCCTGTCTGAGGATCATGCCYGGGTA |
| | (p.Trp183Arg) | | | GTGTTTGGGCCCAATGGGGA′] |
| 2443 | NM_000138.4(FBN1): c.7531T > | 2200 | FBN1 | [′CACCATTGGCGGCTTCACATGCAAAYGTCCT |
| | C (p.Cys2511Arg) | | | CCCGGATTTACCCAACACCA′] |
| 2444 | NM_000138.4(FBN1): c.7111T > | 2200 | FBN1 | [′ATGCTGCTGTGACGGAGGGAGAGGCYGGGG |
| | C (p.Trp2371Arg) | | | TCCCCACTGTGAGATCTGCCC′] |
| 2445 | NM_000138.4(FBN1): c.6274T > | 2200 | FBN1 | [′CTGCTGTGCCTTGAAGGGAGAAGGCYGGGG |
| | C (p.Trp2092Arg) | | | AGACCCCTGCGAGCTCTGCCC′] |
| 2446 | NM_000138.4(FBN1): c.5746T > | 2200 | FBN1 | [′CACAATTGGTTCCTTCAACTGCCGCYGCAAT |
| | C (p.Cys1916Arg) | | | CATGGTTTCATCCTTTCTCA′] |
| 2447 | NM_000138.4(FBN1): c.5726T > | 2200 | FBN1 | [′GGGAATGGAACTTGCCGGAACACAAYTGGT |
| | C (p.Ile1909Thr) | | | TCCTTCAACTGCCGCTGCAAT′] |
| 2448 | NM_000138.4(FBN1): c.1468 + 2T > | 2200 | FBN1 | [′TGGACCTCCGTGGGGAGTGTATTGGYACGT |
| | C | | | GATCCATCCTAGGTTGGCACC′] |
| 2449 | NM_004572.3(PKP2): c.2386T > | 5318 | PKP2 | [′TCTCATTGAAACTACAGCCTCTGCCYGTTAC |
| | C (p.Cys796Arg) | | | ACATTGAACAACATAATCCA′] |
| 2450 | NM_004333.4(BRAF): c.1783T > | 673 | BRAF | [′AGACCTCACAGTAAAAATAGGTGATYTTGG |
| | C (p.Phe595Leu) | | | TCTAGCTACAGTGAAATCTCG′] |
| 2451 | NM_000543.4(SMPD1): c.416T > | 6609 | SMPD1 | [′GCCGTGTGCCAATCCATTGTCCACCYCTTTG |
| | C (p.Leu139Pro) | | | AGGATGACATGGTGGAGGTG′] |
| 2452 | NM_000016.5(ACADM): c.698T > | 34 | ACADM | [′GAAGCAGATACCCCAGGAATTCAGAHTGGG |
| | C (p.Ile233Thr) | | | AGAAAGGTAAAGTATTTATTA′] |
| 2453 | NM_004453.3(ETFDH): c.1852T > | 2110 | ETFDH | [′AGGAGGACCTGCTTACAATGGAATGYAAAC |
| | C (p.Ter618Gln) | | | TGCAGCTAGCCAGTTTCTTTC′] |
| 2454 | NM_000255.3(MUT): c.842T > C | 4594 | MUT | [GCCATTCTGGAGCTGGCCTATACTTYAGCAG |
| | (p.Leu281Ser) | | | ATGGATTGGAGTACTCTAGA′] |
| 2455 | NM_000277.1(PAH): c.2T > C | 5053 | PAH | [′AGACCTCACTCCCGGGGAGCCAGCABGTCC |
| | (p.Met1Thr) | | | ACTGCGGTCCTGGAAAACCCA′] |
| 2456 | NM_000017.3(ACADS): c.1057T > | 35 | ACADS | [′GGCAGCCATGGCCAAGCTGGCCGCCYCGGA |
| | C (p.Ser353Pro) | | | GGCCGCGACCGCCATCAGCCA′] |
| 2457 | NM_002225.3(IVD): c.295 + 2T > | 3712 | IVD | [′GCGTATTGGGCATCACAGCCCCTGGYGAGT |
| | C | | | ATAGTGTCTTTCCCTAAAAAG′] |
| 2458 | NM_000030.2(AGXT): c.2T > C | 189 | AGXT | [′CGAGCGGCAGGTTGGGTGCGGACCAYGGCC |
| | (p.Met1Thr) | | | TCTCACAAGCTGCTGGTGACC′] |
| 2459 | NM_000030.2(AGXT): c.77T > C | 189 | AGXT | [′CTCTCCATCCCCAACCAGCTCCTGCYGGGGC |
| | (p.Leu26Pro) | | | CTGGTCCTTCCAACCTGCCT′] |
| 2460 | NM_000030.2(AGXT): c.449T > C | 189 | AGXT | [′GGCCTGGCCCAGCACAAGCCAGTGCYGCTG |
| | (p.Leu150Pro) | | | TTCTTAACCCACGGGGAGTCG′] |
| 2461 | NM_000030.2(AGXT): c.497T > C | 189 | AGXT | [′TCGTCCACCGGCGTGCTGCAGCCCCHTGATG |
| | (p.Leu166Pro) | | | GCTTCGGGGAACTCTGCCAC′] |
| 2462 | NM_000030.2(AGXT): c.661T > C | 189 | AGXT | [′CGCCCCTCCAGGGACCTCGCTCATCYCCTTC |
| | (p.Ser221Pro) | | | AGTGACAAGGCCAAGTGAGT′] |
| 2463 | NM_000030.2(AGXT): c.757T > C | 189 | AGXT | [′CAAGTGGCTGGCCAACTTCTGGGGCYGTGA |
| | (p.Cys253Arg) | | | CGACCAGCCCAGGATGTGAGG′] |
| 2464 | NM_000030.2(AGXT): c.806T > C | 189 | AGXT | [′CATCACACAATCCCCGTCATCAGCCYGTACA |
| | (p.Leu269Pro) | | | GCCTGAGAGAGAGCCTGGCC′] |
| 2465 | NM_000030.2(AGXT): c.851T > C | 189 | AGXT | [′CCAGCGCCATCTCCCACACAGGGCCYGGAG |
| | (p.Leu284Pro) | | | AACAGCTGGCGCCAGCACCGC′] |
| 2466 | NM_000030.2(AGXT): c.893T > C | 189 | AGXT | [′CAGCACCGCGAGGCCGCGGCGTATCYGCAT |
| | (p.Leu298Pro) | | | GGGCGCCTGCAGGCACTGGGG′] |
| 2467 | NM_000030.2(AGXT): c.947T > C | 189 | AGXT | [′TGAGCCAGGCCCCTCCTGCAGGCGCYCCGG |
| | (p.Leu316Pro) | | | CTTCCCACAGTCACCACTGTG′] |
| 2468 | NM_000030.2(AGXT): c.1076T > | 189 | AGXT | [′AGCCCGCCCTGTGCCCCCCAGGTGCYGCGG |
| | C (p.Leu359Pro) | | | ATCGGCCTGCTGGGCTGCAAT′] |
| 2469 | NM_000030.2(AGXT): c.1151T > | 189 | AGXT | [′GTGACGGAGGCCCTGAGGGCGGCCCYGCAG |
| | C (p.Leu384Pro) | | | CACTGCCCCAAGAAGAAGCTG′] |
| 2470 | NM_012203.1(GRHPR): c.203T > | 9380 | GRHPR | [′TCCGACCACGTGGACAAGAGGATCCYGGAT |
| | C (p.Leu68Pro) | | | GCTGCAGGTGCACACTGGGTG′] |
| 2471 | NM_012203.1(GRHPR): c.965T > | 9380 | GRHPR | [′CTGGCTGGCCTGAGAGGGGAGCCGABGCCT |
| | C (p.Met322Thr) | | | AGTGAACTCAAGCTGTAGCCA′] |
| 2472 | NM_138413.3(HOGA1): c.533T > | 112817 | HOGA1 | [′GTCCCAGCCAACACAGGGCTGGACCYGCCT |
| | C (p.Leu178Pro) | | | GTGGATGCAGTGGTCACGCTT′] |
| 2473 | NM_138413.3(HOGA1): c.875T > | 112817 | HOGA1 | [′GGGATCCCAGGGCTGAAGAAAATCAYGGAC |
| | C (p.Met292Thr) | | | TGGTTTGGCTACTATGGAGGC′] |
| 2474 | NM_004370.5(COL12A1): c.7001T > | 1303 | COL12A1 | [′TTCTTGACTGATGCCTCCTGGAGCAYTGGGG |
| | C (p.Ile2334Thr) | | | ACGATAATTTTAACAAAGTT′] |
| 2475 | NM_019074.3(DLL4): c.583T > C | 54567 | DLL4 | [′CCTGTGCAAGAAGCGCAATGACCACYTCGG |
| | (p.Phe195Leu) | | | CCACTATGTGTGCCAGCCAGA′] |
| 2476 | NM_019074.3(DLL4): c.1168T > | 54567 | DLL4 | [′CCAGGGGGCCAACTATGCTTGTGAAYGTCC |
| | C (p.Cys390Arg) | | | CCCCAACTTCACCGGCTCCAA′] |
| 2477 | NM_015909.3(NBAS): c.3164T > | 51594 | NBAS | [′TCAGAGCTTTTGGAAAAACATGGACYCGAG |
| | C (p.Leu1055Pro) | | | AAACCAATTTCATTTGTTAAA′] |
| 2478 | NM_000263.3(NAGLU): c.1208T > | 4669 | NAGLU | [′GCCTCCTTCCAGGGCCAGCCCTTCAYCTGGT |
| | C (p.Ile403Thr) | | | GCATGCTGCACAACTTTGGG′] |
| 2479 | NM_203290.2(POLR1C): c.436T > | 9533 | POLR1C | [′TCTACAGTTTCGTCTCCAGGTCAGAYGCACT |
| | C (p.Cys146Arg) | | | CGGAACCCCCATGCTGCTAA′] |
| 2480 | NM_018359.3(UFSP2): c.868T > | −1 | — | [CCAGGGCATATATGGCTATCATCATYATATG |
| | C (p.Tyr290His) | | | CAGGATCGCATAGATGACAA′] |
| 2481 | NM_000310.3(PPT1): c.2T > C | 5538 | PPT1 | [′CCGCGGTCATGTGACACAGCGAAGAYGGCG |
| | (p.Met1Thr) | | | TCGCCCGGCTGCCTGTGGCTC′] |
| 2482 | NM_021007.2(SCN2A): c.1271T > | 6326 | SCN2A | [′CTAATAAATTTGATCTTGGCTGTGGYGGCCA |
| | C (p.Val424Ala) | | | TGGCCTATGAGGAACAGAAT′] |
| 2483 | NM_021007.2(SCN2A): c.2306T > | 6326 | SCN2A | [′GTTGACCTGGCCATCACCATCTGCAYTGTCT |
| | C (p.Ile769Thr) | | | TAAATACACTCTTCATGGCT′] |
| 2484 | NM_021007.2(SCN2A): c.4308 + | 6326 | SCN2A | [′TATGCAGCTGTTGATTCACGAAATGYAAGTC |
| | 2T > C | | | TAGTTAGAGGGAAATTGTTT′] |
| 2485 | NM_021007.2(SCN2A): c.4718T > | 6326 | SCN2A | [′TGGATTAATCTGGTGTTTATTGTTCYGTTCA |
| | C (p.Leu1573Pro) | | | CTGGAGAATGTGTGCTGAAA′] |
| 2486 | NM_001165963.1(SCN1A): c. | −1 | — | [′CAGCTCATTGCCATGGATTTGCCCAHGGTGA |
| | 5567T > C (p.Met1856Thr) | | | GTGGTGACCGGATCCACTGT′] |
| 2487 | NM_001165963.1(SCN1A): c. | 6323 | SCN1A | [′AATCCCAATTATGGCTACACAAGCTYTGATA |
| | 1094T > C (p.Phe365Ser) | | | CCTTCAGTTGGGCTTTTTTG′] |
| 2488 | NM_001165963.1(SCN1A): c. | 6323 | SCN1A | [′TCGGCATTGAGAACATTCAGAGTTCYCCGA |
| | 662T > C (p.Leu221Pro) | | | GCATTGAAGACGATTTCAGTC′] |
| 2489 | NM_000806.5(GABRA1): c.788T > | 2554 | GABRA1 | [′ATTCAAACATACCTGCCATGCATAAYGACA |
| | C (p.Met263Thr) | | | GTGATTCTCTCACAAGTCTCC′] |
| 2490 | NM_014191.3(SCN8A): c.4889T > | 6334 | SCN8A | [′GCCCGTATTGGGCGCATCTTGCGTCYGATCA |
| | C (p.Leu1630Pro) | | | AAGGCGCCAAAGGGATTCGT′] |
| 2491 | NM_005249.4(FOXG1): c.673T > | 2290 | FOXG1 | [′TTACTACCGCGAGAACAAGCAGGGCYGGCA |
| | C (p.Trp225Arg) | | | GAACTCCATCCGCCACAATCT′] |
| 2492 | NM_017882.2(CLN6): c.486 + 2T > | 54982 | CLN6 | [′AAGAATCTCAAGCCGGAGACGCTGGYGAGG |
| | C | | | CCACCTCCTGCTCCCTGCCTG′] |
| 2493 | NM_002693.2(POLG): c.1808T > | 5428 | POLG | [′AGGGAAGCCATCCCAGGTAAGTGCCRTGAG |
| | C (p.Met603Thr) | | | TTTAGGTGTGACCCGCATCTG′] |
| 2494 | NM_002693.2(POLG): c.1283T > | 5428 | POLG | [′AGGCAGGTAGGAGACACCCATCTCCRGCAT |
| | C (p.Leu428Pro) | | | GCCGGCCAGAGTCACTGGGTG′] |
| 2495 | NM_018129.3(PNPO): c.2T > C | 55163 | PNPO | [′GGGTCACGTGGCCGGCGGCCCCCCAYGACG |
| | (p.Met1Thr) | | | TGCTGGCTGCGGGGCGTCACG′] |
| 2496 | NM_007254.3(PNKP): c.1029 + | 11284 | PNKP | [′ACCCCCACCCCCGCCCCAGGGCCTCRCCGGA |
| | 2T > C | | | TCAAAGGCTGGGAGCTCGAA′] |
| 2497 | NM_172107.2(KCNQ2): c.583T > | 3785 | KCNQ2 | [′CTCCCAGGGCAACGTCTTTGCCACAYCTGCG |
| | C (p.Ser195Pro) | | | CTCCGGAGCCTGCGCTTCCT′] |
| 2498 | NM_000026.2(ADSL): c.340T > C | 158 | ADSL | [′TATTCACCTTGGTGCTACTTCTTGCYATGTTG |
| | (p.Tyr114His) | | | GAGACAATACTGTAGGCGC′] |
| 2499 | NM_000026.2(ADSL): c.1339T > | 158 | ADSL | [CCAGTTGGATCATTTACTGGATCCTYCTTCT |
| | C (p.Ser447Pro) | | | TTCACTGGTCGTGCCTCCCA′] |
| 2500 | NM_001356.4(DDX3X): c.704T > | 1654 | DDX3X | [′GGGTCTGGAAAAACTGCAGCATTTCYGTTGC |
| | C (p.Leu235Pro) | | | CCATCTTGAGTCAGATTTAT′] |
| 2501 | NM_001356.4(DDX3X): c.1175T > | 1654 | DDX3X | [′TAAAAATTTTTTTTCTTTCAGATGCYGGCTC |
| | C (p.Leu392Pro) | | | GTGATTTCTTAGATGAATAT′] |
| 2502 | NM_001356.4(DDX3X): c.1541T > | 1654 | DDX3X | [′GACATTTCAAATGTGAAACATGTTAYCAATT |
| | C (p.Ile514Thr) | | | TTGACTTGCCAAGTGATATT′] |
| 2503 | NM_020533.2(MCOLN1): c.317T > | 57192 | MCOLN1 | [′ACCATCGCCTTCCGACACCTCTTCCYGCTGG |
| | C (p.Leu106Pro) | | | GCTACTCGGACGGAGCGGAT′] |
| 2504 | NM_020533.2(MCOLN1): c.1340T > | 57192 | MCOLN1 | [′TACTGCTTCTGTGGCTGGATCGTGCYGGGGC |
| | C (p.Leu447Pro) | | | CCTATCATGTGAAGGTACAT′] |
| 2505 | NM_000083.2(CLCN1): c.1283T > | 1180 | CLCN1 | [′CCCCGCGAAGCCATCAGTACTTTGTYTGACA |
| | C (p.Phe428Ser) | | | ACAATACATGGGTGAAACAC′] |
| 2506 | NM_003995.3(NPR2): c.226T > C | 4882 | NPR2 | [′CAGCTCCGAACTGGAAGGCGCCTGCYCTGA |
| | (p.Ser76Pro) | | | GTACCTGGCACCGCTGAGCGC′] |
| 2507 | NM_004700.3(KCNQ4): c.808T > | 9132 | KCNQ4 | [′GGACGCCAACTCCGACTTCTCCTCCYACGCC |
| | C (p.Tyr270His) | | | GACTCGCTCTGGTGGGGGAC′] |
| 2508 | NM_004700.3(KCNQ4): c.823T > | 9132 | KCNQ4 | [′CTTCTCCTCCTACGCCGACTCGCTCYGGTGG |
| | C (p.Trp275Arg) | | | GGGACGGTGCGTGAGGGTCT′] |
| 2509 | NM_005097.3(LGI1): c.124T > C | 9211 | LGI1 | [′GGGGAAGAAACCAGCGAAGCCAAAABGCCC |
| | (p.Cys42Arg) | | | TGCCGTGTGTACTTGTACCAA′] |
| 2510 | NM_005572.3(LMNA): c.936 + 2T > | 4000 | LMNA | [′CAGCTCAGCCAGCTCCAGAAGCAGGYGATA |
| | C | | | CCCCACCTCACCCCTCTCTCC′] |
| 2511 | NM_006009.3(TUBA1A): c.1226T > | 7846 | TUBA | [′AAACGTGCCTTTGTTCACTGGTACGYTGGGG |
| | C (p.Val409Ala) | | | ′ AAGGGGATGGAGGAAGGTGAG′] |
| 2512 | NM_001081550.1(THOC2): c.1313T > | 57187 | THOC2 | [′GACGTGTTCAATATGTTCTGTTACCYTGGTC |
| | C (p.Leu438Pro) | | | CTCACCTTTCTCACGATCCC] |
| 2513 | NM_001081550.1(THOC2): c.3034T > | 57187 | THOC2 | [′ACATCAACAGAAAACTCCAAATTTTYCCAC |
| | C (p.Ser1012Pro) | | | ACTTCTTTGCTATGATCGAGT′] |
| 2514 | NM_001081550.1(THOC2): c.2399T > | 57187 | THOC2 | [′GATTATATAAAGCGAGTGCCTTCAAYTGATG |
| | C (p.Ile800Thr) | | | TACTCTGTAATGAATTTCAT′] |
| 2515 | NM_001356.4(DDX3X): c.1520T > | 1654 | DDX3X | [′CAGGTAGCAGCAAGAGGACTGGACAYTTCA |
| | C (p.Ile507Thr) | | | AATGTGAAACATGTTATCAAT′] |
| 2516 | NM_000158.3(GBE1): c.691 + 2T > | 2632 | GBE1 | [′TGAATAAAAATCACAGTTATTACTTRCCAAG |
| | C | | | GCCTTTGATTCTTGGTAGTA′] |
| 2517 | NM_000719.6(CACNA1C): c.3497T > | 775 | CACNA1C | [′ATGAACATCTTCGTGGGCTTCGTCAYCGTCA |
| | C (p.Ile1166Thr) | | | CCTTTCAGGAGCAGGGGGAG′] |
| 2518 | NM_001105.4(ACVR1): c.587T > | 90 | ACVR1 | [′TGTACATCAGGAAGTGGCTCTGGTCYTCCTT |
| | C (p.Leu196Pro) | | | TTCTGGTACAAAGAACAGTG′] |
| 2519 | NM_024531.4(SLC52A2): c.935T > | 79581 | SLC52A2 | [′CCCTACGGGCGTCTGGCCTACCACCYGGCTG |
| | C (p.Leu312Pro) | | | TGGTGCTGGGCAGTGCTGCC′] |
| 2520 | NM_033409.3(SLC52A3): c.224T > | 113278 | SLC52A3 | [′AGCTGCCTTTCCGAAGTGCCCATCAYCTTCA |
| | C (p.Ile75Thr) | | | CCCTGCTGGGCGTGGGAACC′] |
| 2521 | NM_033409.3(SLC52A3): c.49T > | 113278 | SLC52A3 | [′GGTCTGCGTCTTCGGAATGGGCTCCYGGGTG |
| | C (p.Trp17Arg) | | | ACCATCAATGGGCTCTGGGT′] |
| 2522 | NM_133433.3(NIPBL): c.6108 + | 25836 | NIPBL | [′CCATACCTTACCACTAAATGTAGTGYAAGTA |
| | 2T > C | | | TAGAGCTGTCTTATTCTTGT′] |
| 2523 | NM_002397.4(MEF2C): c.2T > C | 4208 | MEF2C | [′CGTAATCTGAATCTTTTTTCTCCCCDTAGTCC |
| | (p.Met1Thr) | | | CCGTTTTTCTTCTCTCTCT′] |
| 2524 | NM_000124.3(ERCC6): c.2551T > | 2074 | ERCC6 | [′AATACTCGCTGACCCTGCTTGTGCCRTATTT |
| | C (p.Trp851Arg) | | | TCAACAAAGACTCAACAACA′] |
| 2525 | NM_000208.2(INSR): c.1610 + 2T > | 3643 | INSR | [′GTTCATGCTGTTCTACAAAGAGGCGYAAGT |
| | C | | | AGAAGAGTTAGAGAGACGCTG′] |
| 2526 | NM_000071.2(CBS): c.325T > C | 875 | CBS | [′CTCCCGCCCGCGTTGAAGAACTCACRCTTGG |
| | (p.Cys109Arg) | | | CCACTGGGAGGCAGAGATGA′] |
| 2527 | NM_004550.4(NDUFS2): c.875T > | 4720 | NDUFS2 | [′CATTATGCTCTCCACAGTGGAGTGAYGCTTC |
| | C (p.Met292Thr) | | | GGGGCTCAGGCATCCAGTGG′] |
| 2528 | NM_003119.3(SPG7): c.2228T > | 6687 | SPG7 | [′AAGGAAGTGATAAACTATGAGGACAYTGAG |
| | C (p.Ile743Thr) | | | GCTCTCATTGGCCCGCCGCCC′] |
| 2529 | NM_000546.5(TP53): c.584T > C | 7157 | TP53 | [′CACACGCAAATTTCCTTCCACTCGGRTAAGA |
| | (p.Ile195Thr) | | | TGCTGAGGAGGGGCCAGACC′] |
| 2530 | NM_018972.2(GDAP1): c.347T > | 54332 | GDAP1 | [′AGGTTAATGCCTGATAAAGAAAGCAKGTAT |
| | C (p.Met116Thr) | | | TACCCACGGGTACAACATTAC′] |
| 2531 | NM_000070.2(CAPN3): c.566T > | 825 | CAPN3 | [′TGCCTGCCAACGTACAACAATCAACYGGTTT |
| | C (p.Leu189Pro) | | | TCACCAAGTCCAACCACCGC′] |
| 2532 | NM_000070.2(CAPN3): c.1117T > | 825 | CAPN3 | [′TTAATTCCTCCATTTTCCCACCAGAYGGAAG |
| | C (p.Trp373Arg) | | | GACTGGAGCTTTGTGGACAA′] |
| 2533 | NM_181534.3(KRT25): c.950T > | 147183 | KRT25 | [′AAATTGTTCTTTTCATACCGTGGCTRGGAGA |
| | C (p.Leu317Pro) | | | GACTGAAGTTCAATTTCCAG′] |
| 2534 | NM_001002294.2(FMO3): c.560T > | 2328 | FMO3 | [′CCAGGTGTATTCAATGGAAAGCGTGBCCTG |
| | C (p.Val187Ala) | | | GTGGTTGGCCTGGGGAATTCG′] |
| 2535 | NM_001080522.2(CC2D2A): c. | 57545 | CC2D2A | [′GAAATTCAAGCTGAAATAAGTGAACYGTTA |
| | 1676T > C (p.Leu559Pro) | | | GAAGAGCACACGGAGGAGTAC′] |
| 2536 | NM_001080522.2(CC2D2A): c. | 57545 | CC2D2A | [′TACCAAGTCATATTTTCTTCACAGAYTGATG |
| | 3596T > C (p.Ile1199Thr) | | | GAACATTTAAAATAGATATT′] |
| 2537 | NM_025114.3(CEP290): c.2343T > | 80184 | CEP290 | [′CCTGTAACAAATGTATTAAATATTCRTTCTG |
| | C (p.Asn781=) | | | AGAATTAATGATACTGGCAC′] |
| 2538 | NM_030578.3(B9D2): c.107T > C | 80776 | B9D2 | [′CGTTTGGCCCTCCCGCACGCCTGACRGGAGC |
| | (p.Leu36Pro) | | | TTCCATGCCGCCCCTGCAGT′] |
| 2539 | NM_004304.4(ALK): c.3520T > C | 238 | ALK | [′ACATCCCTCTCTGCTCTGCAGCAAAKTCAAC |
| | (p.Phe1174Leu) | | | CACCAGAACATTGTTCGCTG′] |

TABLE 7
Diseases/disorders containging A to G Changes.The table includes human gene
mutations that may be corrected by changing a guanine (G) to adenine (A).The gene name,
gene symbol, and Gene ID are indicated.

| SEQ | | | | |
|---|---|---|---|---|
| ID | | Gene | Gene | |
| NO: | Name | ID | Symbol | Flanks |
| 3144 | NM_017547.3(FOXRED1): c.1289A > | 55572 | FOXRED1 | [′GTGGGCCCCCACCCGCTAGTTGTCAVCATG |
| | G (p.Asn430Ser) | | | TACTTTGCTACTGGCTTCAGT′] |
| 3145 | NM_001006657.1(WDR35): c.25 − | 57539 | WDR35 | [′CTAGTGCGGCTGTGGTTGCTTTTTCVGATT |
| | 2A > G | | | TCCATTCCCAATAACGTGAAG′] |
| 3146 | NM_001006657.1(WDR35): c.1877A > | 57539 | WDR35 | [′TATGTTTTCAGAAACTTGGATCCTGRGGTA |
| | G (p.Glu626Gly) | | | AAAACAAGAAATGAGTGTTAA′] |
| 3147 | NM_000374.4(UROD): c.932A > G | 7389 | UROD | [′GGCAACCTGGACCCCTGTGCCTTGTRTGCA |
| | (p.Tyr311Cys) | | | TCTGAGGTAACAGCCAGGGCC′] |
| 3148 | NM_004315.4(ASAH1): c.155A > G | 427 | ASAH1 | [′ACAGAGGACTGCAGAAAATCAACCTRTCC |
| | (p.Tyr52Cys) | | | TCCTTCAGGACCAACGTGAGTA′] |
| 3149 | NM_004315.4(ASAH1): c.1006A > | 427 | ASAH1 | [′GGGTAGATGGTATGTGGTACAAACARATT |
| | G (p.Asn336Asp) | | | ATGACCGTTGGAAACATCCCTT′] |
| 3150 | NM_000071.2(CBS): c.1150A > G | 875 | CBS | [′GGTGACTCCCCCATCCCGCAGGACCRAGTT |
| | (p.Lys384Glu) | | | CCTGAGCGACAGGTGGATGCT′] |
| 3151 | NM_000274.3(OAT): c.734A > G | 4942 | OAT | [′GGCGTTGTTGTTCCGGATCCAGGTTRCCTA |
| | (p.Tyr245Cys) | | | ATGGGAGTGCGAGAGCTCTGC] |
| 3152 | NM_001385.2(DPYS): c.1001A > G | 1807 | DPYS | [′GATAACTGCACTTTCAACACCTGCCRGAA |
| | (p.Gln334Arg) | | | AGCTCTTGGGAAGGATGATTTT′] |
| 3153 | NN1_024598.3(USB1): c.502A > G | 79650 | USB1 | [′GATTTACACCAATCAAGAGAAAACCRGGT |
| | (p.Arg168Gly) | | | GGGTCCTCCCAACCCCCAATCA′] |
| 3154 | NM_001194958.2(KCNJ18): c.1097A > | 100134444 | KCNJ18 | [′AGTGCGAAGGATCTGGTAGAGAACARGTT |
| | G (p.Lys366Arg) | | | CCTGCTGCCCAGTGCCAACTCC′] |
| 3155 | NM_001914.3(CYB5A): c.130 − | 1528 | CYB5A | [′TTTTTATTCTACCTCTCCTTTGAACRGCATC |
| | 2A > G | | | CTGGTGGGGAAGAAGTTTTA′] |
| 3156 | NM_000398.6(CYB5R3): c.719A > | 1727 | CYB5R3 | [′CGCTTCAAGCTCTGGTACACGCTGGRCAG |
| | G (p.Asp240Gly) | | | AGCCCCTGAAGGTGAGTGAGGG′] |
| 3157 | NM_004628.4(XPC): c.413 − 24A > G | 7508 | XPC | [′ATTATTATTGTTATTACTATTACTGRTTTTT |
| | | | | AAAAATGCTTGTTGATAGAA′] |
| 3158 | NM_001134363.2(RBM20): c.1909A > | 282996 | RBM20 | [′TGGCCCAGAAAGGCCGCGGTCTCGTRGTC |
| | G (p.Ser637Gly) | | | CGGTGAGCCGGTCACTCTCCCC′] |
| 3159 | NM_000552.3(VWF): c.2384A > G | 7450 | VWF | [′GAGTGTACCAAAACGTGCCAGAACTRTGA |
| | (p.Tyr795Cys) | | | CCTGGAGTGCATGAGCATGGGC′] |
| 3160 | NM_000552.3(VWF): c.1583A > G | 7450 | VWF | [′ACCTGCGGCCTGTGTGGGAATTACARTGG |
| | (p.Asn528Ser) | | | CAACCAGGGCGACGACTTCCTT′] |
| 3161 | NM_144573.3(NEXN): c.1955A > G | 91624 | NEXN | [′ACTTTCCCAGAAGATGGAGGAGAGTRTAT |
| | (p.Tyr652Cys) | | | GTGTAAAGCAGTCAACAATAAA′] |
| 3162 | NM_000267.3(NF1): c.4267A > G | 4763 | NF1 | [′CGAAAGGGGCTTGAAGTTAATGTCARAGG |
| | (p.Lys1423Glu) | | | TGAATTATTTTGATAATCTAGC′] |
| 3163 | NM_000267.3(NF1): c.1642 − 8A > G | 4763 | NF1 | [′TCTCTTTGTCTTTCTCTTTTTTAAARAATTC |
| | | | | AGGCTCTGCTGGTTCTTCAT′] |
| 3164 | NM_000267.3(NF1): c.1466A > G | 4763 | NF1 | [′CCTACAGACCTGGAGACAAGAAGCTRTAA |
| | (p.Tyr489Cys) | | | GTATCTTCTCTTGTCCATGGTG′] |
| 3165 | NM_000267.3(NF1): c.5944 − 5A > G | 4763 | NF1 | [′AAAAACATGTTATTTTCCTTCTTCARCTAG |
| | | | | ATTACAGATCTGCTTGATGTT′] |
| 3166 | NM_000308.2(CTSA): c.746 + 3A > G | 5476 | CTSA | [′TACCATGGCCTTCTGGGGAACAGGTRTGG |
| | | | | GATAGGGCAGTTGGGCAATCTC′] |
| 3167 | NM_000308.2(CTSA): c.200A > G | 5476 | CTSA | [′CTGGCCAAGCAGCCGTCTTTCCGCCRGTAC |
| | (p.Gln67Arg) | | | TCCGGCTACCTCAAAGGCTCC′] |
| 3168 | NM_000308.2(CTSA): c.1238A > G | 5476 | CTSA | [′CTTTAGAAATACCAGATCCTATTATRTAAT |
| | (p.Tyr413Cys) | | | GGAGATGTAGACATGGCCTGC′] |
| 3169 | NM_000308.2(CTSA): c.1411A > G | 5476 | CTSA | [′CTCCCACATCGCCTTTCTCACGATCRAGGT |
| | (p.Lys471Glu) | | | AGGGACTGGGCCTGCTGAGAG′] |
| 3170 | NM_000353.2(TAT): c.236 − 5A > G | 6898 | TAT | [′TTCCAAACACAGTAGGGTCCCCTTTYTATG |
| | | | | GGAGGAAAACACAAAAGGAGC′] |
| 3171 | NM_000097.5(CPOX): c.1210A > G | 1371 | CPOX | [′TAATCTGCTGTATGATCGGGGCACARAGTT |
| | (p.Lys404Glu) | | | TGGCCTCTTCACTCCAGGATC′] |
| 3172 | NM_000317.2(PTS): c.155A > G | 5805 | PTS | [′AACAATCCAAATGGCCATGGGCACARTTA |
| | (p.Asn52Ser) | | | TAAAGGTGAGAGAAAAACTGAT′] |
| 3173 | NM_000317.2(PTS): c.139A > G | 5805 | PTS | [′ACTGTTTGGGAAATGCAACAATCCARATG |
| | (p.Asn47Asp) | | | GCCATGGGCACAATTATAAAGG′] |
| 3174 | NM_000317.2(PTS): c.347A > G | 5805 | PTS | [′GAAAATGTAGCTGTTTATATCTGGGRCAAC |
| | (p.Asp116Gly) | | | CTCCAGAAAGTTCTTCCTGTA′] |
| 3175 | NM_000320.2(QDPR): c.449A > G | 5860 | QDPR | [′CCCCATTTCCCAGGTATGATCGGGTRCGGC |
| | (p.Tyr150Cys) | | | ATGGCCAAGGGTGCTGTTCAC′] |
| 3176 | NM_173560.3(RFX6): c.224 − | 222546 | RFX6 | [′TCTATTTTTCTTTATCATCCCTTCARCTGGC |
| | 12A > G | | | AATCAGAAATGCACTTAAAC′] |
| 3177 | NM_001999.3(FBN2): c.3725 − | 2201 | FBN2 | [′TTCATCAATATCTGTGAAAACAGCAYTGC |
| | 15A > G | | | AACCACATTGTCAGGTCTGCTT] |
| 3178 | NM_001040613.2(TMEM70): c.*7 − | 54968 | TMEM70 | [′GATCCTCTCTCTTTTTTTCCCATTTRGGTGT |
| | 2A > G | | | GAAATGTTTCTCTTATTCTA′] |
| 3179 | NM_152416.3(NDUFAF6): c.296A > | 137682 | NDUFAF6 | [′AGGGCCTTTAATGTGGAACTGGCTCRGGCT |
| | G (p.Gln99Arg) | | | GGTATTAAGATACCTTAAAAT′] |
| 3180 | NM_000140.3(FECH): c.1137 + 3A > | 2235 | FECH | [′ACTAAAACGATTGTAACACTGTAGAYACC |
| | G | | | TTAGAGAACAATGGATTTCCAT′] |
| 3181 | NM_000277.1(PAH): c.1A > G | 5053 | PAH | [′GAGACCTCACTCCCGGGGAGCCAGCDTGT |
| | (p.Met1Val) | | | CCACTGCGGTCCTGGAAAACCC′] |
| 3182 | NM_000277.1(PAH): c.611A > G | 5053 | PAH | [′TCCTTGTATAAAACCCATGCTTGCTRTGAG |
| | (p.Tyr204Cys) | | | TACAATCACATTTTTCCACTT] |
| 3183 | NM_000277.1(PAH): c.1241A > G | 5053 | PAH | [′ATACCTCGGCCCTTCTCAGTTCGCTRCGAC |
| | (p.Tyr414Cys) | | | CCATACACCCAAAGGATTGAG′] |
| 3184 | NM_000277.1(PAH): c.662A > G | 5053 | PAH | [′CTTGAAAAGTACTGTGGCTTCCATGRAGAT |
| | (p.Glu221Gly) | | | AACATTCCCCAGCTGGAAGAC] |
| 3185 | NM_000277.1(PAH): c.916A > G | 5053 | PAH | [′TTCTATTTTCCCCCAATTACAGGAARTTGG |
| | (p.Ile306Val) | | | CCTTGCCTCTCTGGGTGCACC′] |
| 3186 | NM_000277.1(PAH): c.1169A > G | 5053 | PAH | [′TTCCAGCCCCTGTATTACGTGGCAGRGAGT |
| | (p.Glu390Gly) | | | TTTAATGATGCCAAGGAGAAA′] |
| 3187 | NM_000277.1(PAH): c.1065 + 3A > G | 5053 | PAH | [′TGTCATCCTTTGGTGAATTACAGGTVTGAC |
| | | | | CTTCACAGGAACCAAGGATAG′] |
| 3188 | NM_000277.1(PAH): c.227A > G | 5053 | PAH | [′AGACCTTCTCGTTTAAAGAAAGATGVGTA |
| | (p.Glu76Gly) | | | TGAATTTTTCACCCATTTGGAT′] |
| 3189 | NM_000130.4(F5): c.1000A > G | 2153 | F5 | [′CATTAAAAACTGCCCAAAGAAAACCRGGA |
| | (p.Arg334Gly) | | | ATCTTAAGAAAATAACTCGTGA′] |
| 3190 | NM_000130.4(F5): c.5189A > G | 2153 | F5 | [′GGCTCTGCCTGTCGGGCTTGGGCCTRCTAC |
| | (p.Tyr1730Cys) | | | TCAGCTGTGAACCCAGTAGGT′] |
| 3191 | NM_000512.4(GALNS): c.1460A > | 2588 | GALNS | [′TTGGTCCCCGCGCAGCCCCAGCTCARCGTG |
| | G (p.Asn487Ser) | | | TGCAACTGGGCGGTCATGGTA′] |
| 3192 | NM_015702.2(MMADHC): c.746A | 27249 | MMADHC | [′ACTCTTTTTGAAACTGATGAACGCTRCCGA |
| | > G (p.Tyr249Cys) | | | CATTTAGGATTCTCTGTTGAT′] |
| 3193 | NM_015141.3(GPD1L): c.370A > G | 23171 | GPD1L | [′TAACTTCTTGGCATCCTTGTAGGGCRTAGA |
| | (p.Ile124Val) | | | CGAGGGCCCCGAGGGGCTGAA′] |
| 3194 | NM_013319.2(UBIAD1): c.305A > G | 29914 | UBIAD1 | [′GTGCACGGGGCCGGTAATTTGGTCARCAC |
| | (p.Asn102Ser) | | | TTACTATGACTTTTCCAAGGGC′] |
| 3195 | NM_013319.2(UBIAD1): c.355A > G | 29914 | UBIAD1 | [′CATTGACCACAAAAAGAGTGATGACRGGA |
| | (p.Arg119Gly) | | | CACTTGTGGACCGAATCTTGGA′] |
| 3196 | NM_013319.2(UBIAD1): c.695A > G | 29914 | UBIAD1 | [′AGCACCGAGGCCATTCTCCATTCCARCAAC |
| | (p.Asn232Ser) | | | ACCAGGGACATGGAGTCCGAC′] |
| 3197 | NM_013319.2(UBIAD1): c.335A > G | 29914 | UBIAD1 | [′TACTATGACTTTTCCAAGGGCATTGRCCAC |
| | (p.Asp112Gly) | | | AAAAAGAGTGATGACAGGACA] |
| 3198 | NM_000046.3(ARSB): c.629A > G | 411 | ARSB | [′GTTGCAACAGGATATAAAAATATGTRTTC |
| | (p.Tyr210Cys) | | | AACAAACATATTCACCAAAAGG] |
| 3199 | NM_006331.7(EMGl): c.257A > G | 10436 | EMG1 | [′CGGGACCCTGGGGAAGCGCGGCCAGRTAT |
| | (p.Asp86Gly) | | | CACCCACCAGGTAACTCCAGGG′] |
| 3200 | NM_000181.3(GUSB): c.1484A > G | 2990 | GUSB | [′CTGCTGCTCTGGTCCTAGGCTCCGTRTGTG |
| | (p.Tyr495Cys) | | | GATGTGATCTGTTTGAACAGC′] |
| 3201 | NM_000067.2(CA2): c.754A > G | 760 | CA2 | [′CTGGCGCCCAGCTCAGCCACTGAAGRACA |
| | (p.Asn252Asp) | | | GGCAAATCAAAGCTTCCTTCAA′] |
| 3202 | NM_000067.2(CA2): c.52A > G | 760 | CA2 | [′TCCCCCAGGACCTGAGCACTGGCATVAGG |
| | (p.Lys18Glu) | | | ACTTCCCCATTGCCAAGGGAGA′] |
| 3203 | NM_000404.2(GLB1): c.947A > G | 2720 | GLB1 | [′TTTATAGGTGGGACCAATTTTGCCTRTTGG |
| | (p.Tyr316Cys) | | | AATGGTAAGAGCACTTTAATA′] |
| 3204 | NM_000404.2(GLB1): c.1498A > G | 2720 | GLB1 | [′TTTGCAGGGTTTGGTTTCTAACCTGRCTCT |
| | (p.Thr500Ala) | | | CAGTTCCAATATCCTCACGGA′] |
| 3205 | NM_000404.2(GLB1): c.1480 − | 2720 | GLB1 | [′GAGAGTCAGGTTAGAAACCAAACCCYGCA |
| | 2A > G | | | AAGCAGAAACAGAGCACAGTGA′] |
| 3206 | NM_000404.2(GLB1): c.1772A > G | 2720 | GLB1 | [′ATTAATGGCTTTAACCTTGGCCGCTRTTGG |
| | (p.Tyr591Cys) | | | CCAGCCCGGGGCCCTCAGTTG′] |
| 3207 | NM_203447.3(DOCK8): c.1418A > | 81704 | DOCK8 | [′ACTCTGAGCGTTAGCAGCTTTTTCARGCAG |
| | G (p.Lys473Arg) | | | GTATCTCTTCACATTACAGTG′] |
| 3208 | NM_000275.2(OCA2): c.1465A > G | 4948 | OCA2 | [′TGCCACTGCCATCGGGGACCCTCCARATGT |
| | (p.Asn489Asp) | | | CATTATTGTTTCCAACCAAGA′] |
| 3209 | NM_152778.2(MFSD8): c.362A > G | 256471 | MFSD8 | [′ATTTCCGTGGCAGCCAACTGCCTCTVTGCA |
| | (p.Tyr121Cys) | | | TATCTCCACATCCCAGCTTCT′] |
| 3210 | NM_139241.3(FGD4): c.1762 − | 121512 | FGD4 | [′ACTGTTCATTTTTCTTTTAAATTTARGGTGG |
| | 2A > G | | | TTTGTTGGAAATGCTCCGAC′] |
| 3211 | NM_020223.3(FAM20C): c.1364 − | 56975 | FAM20C | [′TGTGACACTTTCTGCCTCTCTCCGCRGGAA |
| | 2A > G | | | ACATGGACCGTCACCACTACG′] |
| 3212 | NM_138387.3(G6PC3): c.346A > G | 92579 | G6PC3 | [′GGCAGGCAGCCCTTCTGGACACTGCRTGA |
| | (p.Met116Val) | | | TCACAGGAGCAGCCCTCTGGCC′] |
| 3213 | NM_018122.4(DARS2): c.133A > G | 55157 | DARS2 | [′TTTTTTTTTTTTTTTTAAAGAATTCRGTAGC |
| | (p.Ser45Gly) | | | TTTGTTGTCCGGACCAACAC′] |
| 3214 | NM_000642.2(AGL): c.4260 − | 178 | AGL | [′CATCTTTTATTTAACTTAAATTTCARTCATT |
| | 12A > G | | | TTGCAGTGATATGGTTTACT′] |
| 3215 | NM_000642.2(AGL): c.3439A > G | 178 | AGL | [′TCTACTGGGTGAAGGAATTTATGCCRGATA |
| | (p.Arg1147Gly) | | | CAATTGTCGGGATGCTGTGTG′] |
| 3216 | NM_145014.2(HYLS1): c.632A > G | −1 | — | [′TTAAGCCGAAACCGGGGCAAGACAGRCCG |
| | (p.Asp211Gly) | | | GGTAGCCCGGTATTTTGAGTAC′] |
| 3217 | NM_014362.3(HIBCH): c.365A > G | 26275 | HIBCH | [′GCTCCAGTTTTCTTCAGAGAAGAATRTATG |
| | (p.Tyr122Cys) | | | CTGAATAATGCTGTTGGTATG′] |
| 3218 | NM_014846.3(KIAA0196): c.1411A > | 9897 | KIAA0196 | [′TTTTCTTATTTCTGTATTACTAGAARACCTT |
| | G (p.Asn471Asp) | | | CAAGCTTGGTTCAGAGAGAT′] |
| 3219 | NM_000505.3(F12): c.158A > G | 2161 | F12 | [′GAGCCCTGCCACTTCCCCTTCCAGTRCCAC |
| | (p.Tyr53Cys) | | | CGGCAGCTGTACCACAAATGT′] |
| 3220 | NM_001029871.3(RSPO4): c.194A > | 343637 | RSPO4 | [′TTCATCCGCCGGGAAGGCATCCGCCRGTA |
| | G (p.Gln65Arg) | | | CGGCAAGTGCCTGCACGACTGT′] |
| 3221 | NM_017654.3(SAMD9): c.4483A > | 54809 | SAMD9 | [′TAAAAGACTGGAAAGACTTGTTCACRAAG |
| | G (p.Lys1495Glu) | | | GAAAAATTGACCAGTGCTTTAA′] |
| 3222 | NM_152419.2(HGSNAT): c.372 − | 138050 | HGSNAT | [′TGTCTTAATTTTACCTAATGTTTGTRGGTTG |
| | 2A > G | | | GAATACAGATTTGGAGAATT′] |
| 3223 | NM_001174089.1(SLC4A11): c.2518A > | 83959 | SLC4A11 | [′CATGAGCTCCCTGCCCTACATGAAGRTGAT |
| | G (p.Met840Val) | | | CTTTCCCCTCATCATGATCGC′] |
| 3224 | NM_012073.4(CCT5): c.440A > G | 22948 | CCT5 | [′CAGGCTGCTCGTGTTGCTATTGAACRCCTG |
| | (p.His147Arg) | | | GACAAGATCAGCGATAGCGTC′] |
| 3225 | NM_025114.3(CEP290): c.2991 + | 80184 | CEP290 | [′CACCTGGCCCCAGTTGTAATTGTGARTATC |
| | 1655A > G | | | TCATACCTATCCCTATTGGCA′] |
| 3226 | NM_153704.5(TMEM67): c.870 − | 91147 | TMEM67 | [′TATTAAAACAGTTGTAACTGTTTATRGGAG |
| | 2A > G | | | ACAGAATCTTCCTTGGCTGTT′] |
| 3227 | NM_153704.5(TMEM67): c.1538A > | 91147 | TMEM67 | [′TATCAGGTTTCTTTCTCAGTCACATDTGAA |
| | G (p.Tyr513Cys) | | | ATGGATCATGGAGAAGCACAT′] |
| 3228 | NM_001041.3(SI): c.350A > G | 6476 | SI | [′GTTGATAATCATGGTTATAACGTTCRAGAC |
| | (p.Gln117Arg) | | | ATGACAACAACAAGTATTGGT′] |
| 3229 | NM_015697.7(COQ2): c.890A > G | 27235 | COQ2 | [′TCTGGAGTTATGTGGACACTAATATRTGAT |
| | (p.Tyr297Cys) | | | ACTATTTATGCCCATCAGGTA′] |
| 3230 | NM_015697.7(COQ2): c.683A > G | 27235 | COQ2 | [′GCACTGGGTGTTCTTCTGTGTCTAARTTAC |
| | (p.Asn228Ser) | | | TACAGGTATATTAAACGTTTT′] |
| 3231 | NM_000190.3(HMBS): c.1A > G | 3145 | HMBS | [′CACAGCCTACTTTCCAAGCGGAGCCRTGTC |
| | (p.Met1Val) | | | TGGTAACGGCAATGCGGCTGC′] |
| 3232 | NM_004035.6(ACOX1): c.832A > G | 51 | ACOX1 | [′GAGTAACAAGCTGACTTACGGGACCRTGG |
| | (p.Met278Val) | | | TGTTTGTCAGGTCCTTCCTTGT′] |
| 3233 | NM_004035.6(ACOX1): c.926A > G | 51 | ACOX1 | [′ATCCGATACAGCGCTGTGAGGCACCRGTC |
| | (p.Gln309Arg) | | | TGAAATCAAGCCAGGGTAAGGA′] |
| 3234 | NM_000237.2(LPL): c.548A > G | 4023 | LPL | [′TGCTTTTTTCCCTTTTAAGGCCTCGRTCCAG |
| | (p.Asp183Gly) | | | CTGGACCTAACTTTGAGTAT′] |
| 3235 | NM_000237.2(LPL): c.953A > G | 4023 | LPL | [′TGCAACAATCTGGGCTATGAGATCARTAA |
| | (p.Asn318Ser) | | | AGTCAGAGCCAAAAGAAGCAGC′] |
| 3236 | NM_001171993.1(HPD): c.362A > G | 3242 | HPD | [′TACATCGGCCAATTCTTGCCTGGATRTGAG |
| | (p.Tyr121Cys) | | | GCCCCAGCGTTCATGGACCCC′] |
| 3237 | NM_139281.2(WDR36): c.1064A > | 134430 | WDR36 | [′CTTCTTGTCACAAATGGCGCTGACARTGCT |
| | G (p.Asn355Ser) | | | CTTAGGGTATTATGATTATTG′] |
| 3238 | NM_001127255.1(NLRP7): c.2738A > | −1 | — | [′CTCACAAACCTGGACTTGAGTATCARCCA |
| | G (p.Asn913Ser) | | | GATAGCTCGTGGATTGTGGATT′] |
| 3239 | NM_016417.2(GLRX5): c.294A > G | 51218 | GLRX5 | [′TGCTGGACGACCCGGAGCTCCGACARGGT |
| | (p.Gln98=) | | | CAGGCCAGTGTGCCGGGCAGGC′] |
| 3240 | NM_024884.2(L2HGDH): c.293A > | 79944 | L2HGDH | [′ACTGGACATAACAGTGGTGTCATACRTAG |
| | G (p.His98Arg) | | | TGGAATTTATTATAAACCTGAG′] |
| 3241 | NM_000382.2(ALDH3A2): c.1157A > | 224 | ALDH3A2 | [′ACATCCAGTGGAGGTGTCACAGGCARTGA |
| | G (p.Asn3865er) | | | CGTCATTATGCACTTCACGCTC′] |
| 3242 | NM_018105.2(THAP1): c.266A > G | 55145 | THAP1 | [′TTTCTTTGTACTGAGCCACATGACARGGTA |
| | (p.Lys89Arg) | | | ATATGCATTTTAAAATATTGG′] |
| 3243 | NM_000785.3(CYP27B1): c.566A > | 1594 | CYP27B1 | [′GCCCTGGTTCGGGACGTGGCGGGGGRATT |
| | G (p.Glu189Gly) | | | TTACAAGTTCGGACTGGAAGGT′] |
| 3244 | NM_182548.3(LHFPL5): c.380A > G | 222662 | LHFPL5 | [′TTCATCTGCAACACGGCCACAGTCTRTAAG |
| | (p.Tyr127Cys) | | | ATCTGTGCATGGATGCAGCTG′] |
| 3245 | NM_015040.3(PIKFYVE): c.3308A > | 200576 | PIKFYVE | [′TTCAAAGAAATGGAGAACAGGAGGARGA |
| | G (p.Lys1103Arg) | | | AACAGCTGCTCAGGGATCTCTCT′] |
| 3246 | NM_138701.3(MPLKIP): c.430A > G | 136647 | MPLKIP | [′GTTGGAAAATTATTTCAAGCCTTCARTGCT |
| | (p.Met144Val) | | | TGAAGATCCTTGGGCTGGCCT′] |
| 3247 | NM_152783.4(D2HGDH): c.1315A > | 728294 | D2HGDH | [′TGCCCTTGTCCCTCCAGGAGATGGTRACCT |
| | G (p.Asn439Asp) | | | GCACCTCAATGTGACGGCGGA′] |
| 3248 | NM_022912.2(REEP1): c.183 − | 65055 | REEP1 | [′AACTTGTGTTTTCATCTCTCTCTCCRGGTTT |
| | 2A > G | | | CCATTCTATTATGAACTAAA′] |
| 3249 | NM_000060.3(BTD): c.755A > G | 686 | BTD | [′ACATGCTTTGATATATTGTTCTTTGRCCCT |
| | (p.Asp252Gly) | | | GCCATCAGAGTCCTCAGAGAC′] |
| 3250 | NM_022132.4(MCCC2): c.1309A > | 64087 | MCCC2 | [′TGTGGCCTGTGCCCAAGTGCCTAAGDTAA |
| | G (p.Ile437Val) | | | CCCTCATCATTGGGGGCTCCTA′] |
| 3251 | NM_022132.4(MCCC2): c.569A > G | 64087 | MCCC2 | [′GCAGATGTGTTTCCAGATCGAGACCRCTTT |
| | (p.His190Arg) | | | GGCCGTACATTCTATAATCAG′] |
| 3252 | NM_198578.3(LRRK2): c.5096A > G | 120892 | LRRK2 | [′ATCATCCGACTATATGAAATGCCTTRTTTT |
| | (p.Tyr1699Cys) | | | CCAATGGGATTTTGGTCAAGA′] |
| 3253 | NM_198578.3(LRRK2): c.3364A > G | 120892 | LRRK2 | [′TGTGACTAGAAATAAAATATCAGGGRTAT |
| | (p.Ile1122Val) | | | GCTCCCCCTTGAGACTGAAGGA′] |
| 3254 | NM_000022.2(ADA): c.219 − 2A > G | 100 | ADA | [′TTCCCAACCCCTTTCTTCCCTTCCCRGGGG |
| | | | | CTGCCGGGAGGCTATCAAAAG′] |
| 3255 | NM_000022.2(ADA): c.290A > G | 100 | ADA | [′ATGAAGGCCAAAGAGGGCGTGGTGTDTGT |
| | (p.Tyr97Cys) | | | GGAGGTGCGGTACAGTCCGCAC′] |
| 3256 | NM_017780.3(CHD7): c.3082A > G | 55636 | CHD7 | [′TTTAGTAATTGCCCCATTGTCCACARTCCC |
| | (p.Ile1028Val) | | | CAACTGGGAAAGGGAATTCCG′] |
| 3257 | NM_017780.3(CHD7): c.164A > G | 55636 | CHD7 | [′TTTGCCTCTTTACAGCCATCCCTTCRTCATC |
| | (p.His55Arg) | | | CTTCAACTAATCAAAATCAA′] |
| 3258 | NM_152443.2(RDH12): c.677A > G | 145226 | RDH12 | [′GTCCCAGGCACCGGGGTCACCACCTRCGC |
| | (p.Tyr226Cys) | | | AGTGCACCCAGGCGTCGTCCGC′] |
| 3259 | NM_015335.4(MED13L): c.752A > | 23389 | MED13L | [′TACCCGATGGTGCTAAAAAAGAAAGRAGA |
| | G (p.Glu251Gly) | | | ATCGAAAGAGGAAGACGAGTTG′] |
| 3260 | NM_015335.4(MED13L): c.6068A > | 23389 | MED13L | [′GCTTTTTTTCCCCCCTTCCCTCTAGRTGATA |
| | G (p.Asp2023Gly) | | | TGTTTGTTGACCTTCCATTC′] |
| 3261 | NM_025265.3(TSEN2): c.926A > G | 80746 | TSEN2 | [′TATTTTCAGGCCTTTTTCTTGGTCTRTGCTC |
| | (p.Tyr309Cys) | | | TGGGATGTTTAAGTATTTAC′] |
| 3262 | NM_015384.4(NIPBL): c.7289A > G | 25836 | NIPBL | [′AAAACAGACGTGACTATGCTCTTGTRTATA |
| | (p.Tyr2430Cys) | | | GCAGACAATCTAGCCTGTTTT′] |
| 3263 | NM_207352.3(CYP4V2): c.1091 − | 285440 | CYP4V2 | [′GTCATCTTATCTACTTGCTTTCATCRGGGA |
| | 2A > G | | | AGTCTGACCGTCCCGCTACAG′] |
| 3264 | NM_024006.5(VKORC1): c.172A > | 79001 | VKORC1 | [′CAGCTGTTCGCGCGTCTTCTCCTCCRGGTG |
| | G (p.Arg58Gly) | | | TGCACGGGAGTGGGAGGCGTG′] |
| 3265 | NM_000551.3(VHL): c.491A > G | 7428 | VHL | [′TATACTCTGAAAGAGCGATGCCTCCRGGTT |
| | (p.Gln164Arg) | | | GTCCGGAGCCTAGTCAAGCCT] |
| 3266 | NM_000101.3(CYBA): c.281A > G | 1535 | CYBA | [′AATTACTATGTTCGGGCCGTCCTGCRTCTC |
| | (p.His94Arg) | | | CTGTGAGTCCCCGTCCCGCAC′] |
| 3267 | NM_014874.3(MFN2): c.827A > G | 9927 | MFN2 | [′TTGTTTGGGCTCCAGGTGCGGCGGCRGCAC |
| | (p.Gln276Arg) | | | ATGGAGCGTTGTACCAGCTTC′] |
| 3268 | NM_015046.5(SETX): c.1807A > G | 23064 | SETX | [′GCAGAAGTCAGATCCACAAAAGTGTYACA |
| | (p.Asn603Asp) | | | TGGAGGTGCTTTGAATTTTATG′] |
| 3269 | NM_005609.2(PYGM): c.1A > G | 5837 | PYGM | [′CAGTCCGGCCCGCCCTCCTGCAGCCVTGTC |
| | (p.Met1Val) | | | CCGGCCCCTGTCAGACCAAGA′] |
| 3270 | NM_033071.3(SYNE1): c.15705 − | 23345 | SYNE1 | [′ACTTCACTTCTGTTTTATCCCTGTARTGTTT |
| | 12A > G | | | CTGAAGCATGCAGGAGAAAG′] |
| 3271 | NM_130468.3(CHST14): c.878A > G | 113189 | CHST14 | [′CTGTGCCAGCCTTGTGCCGTGCACTRTGAC |
| | (p.Tyr293Cys) | | | TTTGTGGGCTCCTATGAGAGG′] |
| 3272 | NM_206933.2(USH2A): c.14020A > | 7399 | USH2A | [′AAAAGTTTTGTATTACGAATTATACRGAAG |
| | G (p.Arg4674Gly) | | | ACAAATAGCAACTCAGCCTAG′] |
| 3273 | NM_000048.3(ASL): c.857A > G | 435 | ASL | [′AGCACGGGAAGCAGCCTGATGCCCCRGAA |
| | (p.Gln286Arg) | | | GAAAAACCCCGACAGTTTGGAG′] |
| 3274 | NM_001875.4(CPS1): c.1010A > G | 1373 | CPS1 | [′CAGGCTTTCATTACTGCTCAGAATCRTGGC |
| | (p.His337Arg) | | | TATGCCTTGGACAACACCCTC′] |
| 3275 | NM_001173464.1(KIF21A): c.2839A > | 55605 | KIF21A | [′GACCATTTCCAACATGGAGGCAGATRTGA |
| | G (p.Met947Val) | | | ATAGACTCCTCAAGGTGTGGAA] |
| 3276 | NM_000026.2(ADSL): c.736A > G | 158 | ADSL | [′CATCACAGGGCAGACATATACACGARAAG |
| | (p.Lys246Glu) | | | TGGATATTGAAGTACTGTCTGT′] |
| 3277 | NM_024577.3(SH3TC2): c.530 − | 79628 | SH3TC2 | [′AGCCATTGCTTTTCTCATTATCCACRGGCC |
| | 2A > G | | | ACTTCTTCTGCAGAGCCCTGT′] |
| 3278 | NM_018249.5(CDK5RAP2): c.4005 − | 55755 | CDK5RAP2 | [′AGCATGGGAGATGATTTATCTTTCARTCTC |
| | 15A > G | | | AATGGTTAAGGATTGAGGAAG′] |
| 3279 | NM_000346.3(SOX9): c.517A > G | 6662 | SOX9 | [′GCACAAGAAGGACCACCCGGATTACRAGT |
| | (p.Lys173Glu) | | | ACCAGCCGCGGCGGAGGAAGTC′] |
| 3280 | NM_144596.3(TTC8): c.115 − 2A > G | 123016 | TTC8 | [′GTTTACTGCCTTCTTAATGCTTTCCRGGAA |
| | | | | CCAGATCCTGAATTGCCAGTG′] |
| 3281 | NM_000243.2(MEFV): c.2080A > G | 4210 | MEFV | [′GAATGGCTACTGGGTGGTGATAATGDTGA |
| | (p.Met694Val) | | | AGGAAAATGAGTACCAGGCGTC′] |
| 3282 | NM_000243.2(MEFV): c.2084A > G | 4210 | MEFV | [′GGCTACTGGGTGGTGATAATGATGADGGA |
| | (p.Lys695Arg) | | | AAATGAGTACCAGGCGTCCAGC′] |
| 3283 | NM_006493.2(CLN5): c.1121A > G | 1203 | CLN5 | [′GTGCACAAACAGTTCTATTTGTTTTRTAAT |
| | (p.Tyr374Cys) | | | TTTGAATATTGGTTTTTACCT′] |
| 3284 | NM_000483.4(APOC2): c.1A > G | −1 | — | [′TCAATGTTCCAGGTCTCTGGACACTRTGGG |
| | (p.Met1Val) | | | CACACGACTCCTCCCAGCTCT′] |
| 3285 | NM_058172.5(ANTXR2): c.1142A > | 118429 | ANTXR2 | [′TGGCCAACTGTGGATGCTTCCTATTDTGGT |
| | G (p.Tyr381Cys) | | | GGTCGAGGGGTTGGAGGAATT′] |
| 3286 | NM_001128085.1(ASPA): c.692A > | −1 | — | [′TATAAAATTATAGAGAAAGTTGATTRCCCC |
| | G (p.Tyr231Cys) | | | CGGGATGAAAATGGAGAAATT′] |
| 3287 | NM_001128085.1(ASPA): c.71A > G | −1 | — | [′ATCTTTGGAGGAACCCATGGGAATGRGCT |
| | (p.Glu24Gly) | | | AACCGGAGTATTTCTGGTTAAG′] |
| 3288 | NM_014365.2(HSPB8): c.421A > G | 26353 | HSPB8 | [′TGGCATTGTTTCTAAGAACTTCACARAGAA |
| | (p.Lys141Glu) | | | AATCCAGTAAGTAACCTGGAG′] |
| 3289 | NM_000391.3(TPP1): c.857A > G | 1200 | TPP1 | [′CAGTACCTGATGAGTGCTGGTGCCARCATC |
| | (p.Asn286Ser) | | | TCCACCTGGGTCTACAGTAGC′] |
| 3290 | NM_000391.3(TPP1): c.887 − 10A > G | 1200 | TPP1 | [′TGTCCCTCATGCCGGCCTGGATTTTYTTTTT |
| | | | | TTTTTTTTTTGAGGGATGGG′] |
| 3291 | NM_182760.3(SUMF1): c.1A > G | 285362 | SUMF1 | [′CGGGTCACATGGCCCGCGGGACAACRTGG |
| | (p.Met1Val) | | | CTGCGCCCGCACTAGGGCTGGT′] |
| 3292 | NM_031443.3(CCM2): c.1A > G | 83605 | CCM2 | [′GGCCGCGGGAGCCGCACGCGGCGATRTGG |
| | (p.Met1Val) | | | AAGAGGAGGGCAAGAAGGGCAA′] |
| 3293 | NM_004183.3(BEST1): c.707A > G | 7439 | BEST1 | [′GACTGGATTAGTATCCCACTGGTGTRTACA |
| | (p.Tyr236Cys) | | | CAGGTGAGGACTAGGCTGGTG′] |
| 3294 | NM_004183.3(BEST1): c.680A > G | 7439 | BEST1 | [′ACTCAGTGTGGACACCTGTATGCCTRCGAC |
| | (p.Tyr227Cys) | | | TGGATTAGTATCCCACTGGTG′] |
| 3295 | NM_000158.3(GBE1): c.1634A > G | 2632 | GBE1 | [′TGTAATGCAGGTAATGAATTTGGGCRTCCT |
| | (p.His545Arg) | | | GAATGGTTAGACTTCCCAAGA′] |
| 3296 | NM_000158.3(GBE1): c.1883A > G | 2632 | GBE1 | [′GGTCTTCTTTTCATTTTCAACTTCCRTCCAA |
| | (p.His628Arg) | | | GCAAGAGCTACACTGACTAC′] |
| 3297 | NM_017890.4(VPS13B): c.8978A > | 157680 | VPS13B | [′CTTCTGCCCTGGGCCCTGCTTATCARTGAA |
| | G (p.Asn2993Ser) | | | TCCAAATGGGACCTCTGGCTA′] |
| 3298 | NM_000019.3(ACAT1): c.278A > G | 38 | ACAT1 | [′GAAGTGAAAGAAGCATACATGGGTARTGT |
| | (p.Asn93Ser) | | | TCTACAAGGAGGTGAAGGACAA′] |
| 3299 | NM_173076.2(ABCA12): c.4139A > | 26154 | ABCA12 | [′CATATTACTTCATTGCTGGGGCCCARTGGA |
| | G (p.Asn1380Ser) | | | GCTGGGAAAACTACTACCATG′] |
| 3300 | NM_030665.3(RAH): c.4685A > G | 10743 | RAH | [′AAGGGGCGTGCCAAGCGACGACGACRGCA |
| | (p.Gln1562Arg) | | | GCAGGTGCTGCCCCTGGATCCC] |
| 3301 | NM_000271.4(NPC1): c.3467A > G | 4864 | NPC1 | [′AGTCTGAACGCTGTATCCTTGGTCARCCTG |
| | (p.Asn1156Ser) | | | GTGATGGTGAGTCCTCATACA′] |
| 3302 | NM_000271.4(NPC1): c.3263A > G | 4864 | NPC1 | [′CCCTCCAGTGTGTTTTATGTCTTCTRCGAA |
| | (p.Tyr1088Cys) | | | CAGTACCTGACCATCATTGAC′] |
| 3303 | NM_000543.4(SMPD1): c.1154A > | 6609 | SMPD1 | [′CTCCGCCTCATCTCTCTCAATATGARTTTTT |
| | G (p.Asn385Ser) | | | GTTCCCGTGAGAACTTCTGG′] |
| 3304 | NM_000226.3(KRT9): c.469A > G | 3857 | KRT9 | [′TCTGACTGCTAATGAGAAGAGCACCRTGC |
| | (p.Met157Val) | | | AGGAACTCAATTCTCGGCTGGC′] |
| 3305 | NM_000226.3(KRT9): c.482A > G | 3857 | KRT9 | [′GAGAAGAGCACCATGCAGGAACTCADTTC |
| | (p.Asn161Ser) | | | TCGGCTGGCCTCTTACTTGGAT] |
| 3306 | NM_176824.2(BBS7): c.968A > G | 55212 | BBS7 | [′ACAGGTCTGACAACAGAGCCCATTCRTAA |
| | (p.His323Arg) | | | GGAAAGTGGACCAGGAGAAGAA′] |
| 3307 | NM_000051.3(ATM): c.3118A > G | 472 | ATM | [′GAGGAAATATATATTCTCTGTAAGARTGG |
| | (p.Met1040Val) | | | CCCTAGTAAATTGCCTTAAAAC′] |
| 3308 | NM_000051.3(ATM): c.7268A > G | 472 | ATM | [′GCTCTCCTGAAAAGAGCCAAAGAGGRAGT |
| | (p.Glu2423Gly) | | | AGGTCTCCTTAGGGAACATAAA′] |
| 3309 | NM_000051.3(ATM): c.8030A > G | −1 | — | [′TATTAGGTGGACCACACAGGAGAATRTGG |
| | (p.Tyr2677Cys) | | | AAATCTGGTGACTATACAGTCA] |
| 3310 | NM_000487.5(ARSA): c.*96A > G | 410 | ARSA | [′GAGGGGGTTTGTGCCTGATAACGTARTAA |
| | | | | CACCAGTGGAGACTTGCAGATG′] |
| 3311 | NM_000487.5(ARSA): c.1055A > G | 410 | ARSA | [′GCCCTGGCTGGGGCCCCACTGCCCARTGTC |
| | (p.Asn352Ser) | | | ACCTTGGATGGCTTTGACCTC′] |
| 3312 | NM_000218.2(KCNQ1): c.418A > G | 3784 | KCNQ1 | [′CATCGTCCTGGTCTGCCTCATCTTCRGCGT |
| | (p.Ser140Gly) | | | GCTGTCCACCATCGAGCAGTA′] |
| 3313 | NM_172250.2(MMAA): c.620A > G | 166785 | MMAA | [′GAGTTATCAAGAGATATGAATGCATRCAT |
| | (p.Tyr207Cys) | | | CAGGCCATCTCCTACTAGAGGA′] |
| 3314 | NM_000187.3(HGD): c.1112A > | 3081 | HGD | [′AGTCTACACAGCACAATGACCCCCCRTGG |
| | (p.His371Arg) | | | ACCTGATGCTGACTGCTTTGAG′] |
| 3315 | NM_000187.3(HGD): c.1102A > G | 3081 | HGD | [′AGGGGGAGGGAGTCTACACAGCACARTGA |
| | (p.Met368Val) | | | CCCCCCATGGACCTGATGCTGA′] |
| 3316 | NM_138477.2(CDAN1): c.1796A > | 146059 | CDAN1 | [′CTGAGCTTGAAGATCCAGGAGCTCARTGG |
| | G (p.Asn599Ser) | | | TCTTGCCCTGCCCCAGCATGAG′] |
| 3317 | NM_001079802.1(FKTN): c.1112A > | 2218 | FKTN | [′GTAAAACTTGATGTTTTTTTCTTCTRTGAA |
| | G (p.Tyr371Cys) | | | GAAACTGATCACATGTGGAAT′] |
| 3318 | NM_013382.5(POMT2): c.1997A > | 29954 | POMT2 | [′GCTTGAGAAGAGCATGGCTGGGAAGYAGT |
| | G (p.Tyr666Cys) | | | GGTGGAAGTAGAGGACCCGGCC′] |
| 3319 | NM_000529.2(MC2R): c.761A > G | 4158 | MC2R | [′CCAAGTAACCCCTACTGCGCCTGCTRCATG |
| | (p.Tyr254Cys) | | | TCTCTCTTCCAGGTGAACGGC] |
| 3320 | NM_000383.3(AIRE): c.247A > G | 326 | AIRE | [′CCTGGACTTCTGGAGGGTGCTGTTCRAGGA |
| | (p.Lys83Glu) | | | CTACAACCTGGAGCGCTATGG′] |
| 3321 | NM_020436.3(SALL4): c.2663A > G | 57167 | SALL4 | [′TCGTCTGCTAGCGCTCTTCAGATCCRCGAG |
| | (p.His888Arg) | | | CGGACTCACACTGGAGAGAAG′] |
| 3322 | NM_203288.1(RP9): c.509A > G | 6100 | RP9 | [′CAGTTACTGGAGGATTCTACCTCAGRTGAA |
| | (p.Asp170Gly) | | | GATAGGAGCAGCTCCAGTTCC′] |
| 3323 | NM_000348.3(SRD5A2): c.692A > G | 6716 | SRD5A2 | [′TTCCTTGGGCTGCGAGCTTTTCACCRCCAT |
| | (p.His231Arg) | | | AGGTAAATTTTTCAATAAAAG′] |
| 3324 | NM_006445.3(PRPF8): c.6926A > G | 10594 | PRPF8 | [′CCCAAAGAGTTCTACCACGAGGTGCVCAG |
| | (p.His2309Arg) | | | GCCCTCTCACTTCCTCAACTTT′] |
| 3325 | NM_018319.3(TDP1): c.1478A > G | 55775 | TDP1 | [′TCTGGCCGCAGCAATGCCATGCCACRTATT |
| | (p.His493Arg) | | | AAGACATATATGAGGCCTTCT′] |
| 3326 | NM_144773.2(PROKR2): c.629A > | 128674 | PROKR2 | [′AGCCAGGAGAAGATCTTCTGTGGCCRGAT |
| | G (p.Gln210Arg) | | | CTGGCCTGTGGATCAGCAGCTC′] |
| 3327 | NM_001604.5(PAX6): c.1075 − | 5080 | PAX6 | [′ACCACAGGTTTGCCTCTCTCCTCACRGCCC |
| | 2A > G | | | CCAGTCCCCAGCCAGACCTCC′] |
| 3328 | NM_000280.4(PAX6): c.1171A > G | 5080 | PAX6 | [′CAGTCAGCCAATGGGCACCTCGGGCRCCA |
| | (p.Thr391Ala) | | | CTTCAACAGGTGAGCCACTGCT′] |
| 3329 | NM_024426.4(WT1): c.1391A > G | 7490 | WT1 | [′TGTCAGCGAAAGTTCTCCCGGTCCGRCCAC |
| | (p.Asp464Gly) | | | CTGAAGACCCACACCAGGACT′] |
| 3330 | NM_024426.4(WT1): c.1021A > G | 7490 | WT1 | [′TTGCAGCCACAGCACAGGGTACGAGRGCG |
| | (p.Ser341Gly) | | | ATAACCACACAACGCCCATCCT′] |
| 3331 | NM_005957.4(MTHFR): c.971A > G | 4524 | MTHFR | [′CCAGGCCTCCACTTCTACACCCTCARCCGC |
| | (p.Asn324Ser) | | | GAGATGGCTACCACAGAGGTG′] |
| 3332 | NM_001127328.2(ACADM): c.997A > | 34 | ACADM | [′TAACTCATTCTAGCTAGTTCAACTTYCATT |
| | G (p.Lys333Glu) | | | GCCATTTCAGCCAGCATAAAT′] |
| 3333 | NM_001127328.2(ACADM): c.589A > | 34 | ACADM | [′TATTAATGGTCAGAAGATGTGGATARCCA |
| | G (p.Thr197Ala) | | | ACGGAGGAAAAGCTAATTGGTA′] |
| 3334 | NM_000155.3(GALT): c.940A > G | 2592 | GALT | [′AGGATCAGAGGCTGGGGCCAACTGGRACC |
| | (p.Asn314Asp) | | | ATTGGCAGCTGCACGCTCATTA′] |
| 3335 | NM_000155.3(GALT): c.563A > G | 2592 | GALT | [′TGTTCTAACCCCCACCCCCACTGCCRGGTA |
| | (p.Gln188Arg) | | | AGGGTGTCAGGGGCTCCAGTG′] |
| 3336 | NM_000250.1(MPO): c.518A > G | 4353 | MPO | [′GTTGCACATCCCGGTGATGGTGCGGYATTT |
| | (p.Tyr173Cys) | | | GTCCTGCTCCGGGCAAGTCAC′] |
| 3337 | NM_020247.4(ADCK3): c.1541A > | 56997 | ADCK3 | [′TTGGATTTTGGGGCAACGCGGGAATRTGA |
| | G (p.Tyr514Cys) | | | CAGATCCTTCACCGACCTCTAC′] |
| 3338 | NM_000229.1(LCAT): c.463A > G | 3931 | LCAT | [′CACACTGGTGCAGAACCTGGTCAACRATG |
| | (p.Asn155Asp) | | | GCTACGTGCGGGACGAGACTGT′] |
| 3339 | NM_000403.3(GALE): c.101A > G | 2582 | GALE | [′GGCTACTTGCCTGTGGTCATCGATARCTTC |
| | (p.Asn34Ser) | | | CATAATGCCTTCCGTGGTGAG′] |
| 3340 | NM_001008216.1(GALE): c.308A > | 2582 | GALE | [′GGCGAGTCGGTGCAGAAGCCTCTGGRTTA |
| | G (p.Asp103Gly) | | | TTACAGAGTTAACCTGACCGGG′] |
| 3341 | NM_000403.3(GALE): c.770A > G | 2582 | GALE | [′AAGGGCCACATTGCAGCCTTAAGGARGCT |
| | (p.Lys257Arg) | | | GAAAGAACAGTGTGGCTGCCGG′] |
| 3342 | NM_000527.4(LDLR): c.2483A > G | 3949 | LDLR | [′AGCATCAACTTTGACAACCCCGTCTRTCAG |
| | (p.Tyr828Cys) | | | AAGACCACAGAGGATGAGGTC′] |
| 3343 | NM_024740.2(ALG9): c.860A > G | 79796 | ALG9 | [′ATTGCACCACTCAACATTGTTTTGTRTAAT |
| | (p.Tyr287Cys) | | | GTCTTTACTCCTCATGGACCT′] |
| 3344 | NM_000375.2(UROS): c.184A > G | 7390 | UROS | [′TGAAGATTACGGGGGACTCATTTTTRCCAG |
| | (p.Thr62Ala) | | | CCCCAGAGCAGTGGAAGCAGC′] |
| 3345 | NM_000372.4(TYR): c.125A > G | 7299 | TYR | [′GAATGCTGTCCACCGTGGAGCGGGGRCAG |
| | (p.Asp42Gly) | | | GAGTCCCTGTGGCCAGCTTTCA′] |
| 3346 | NM_000372.4(TYR): c.1A > G | 7299 | TYR | [′AGACCTTGTGAGGACTAGAGGAAGARTGC |
| | (p.Met1Val) | | | TCCTGGCTGTTTTGTACTGCCT′] |
| 3347 | NM_000053.3(ATP7B): c.3809A > G | 540 | ATP7B | [′GTCGCCATGGTGGGGGATGGGGTCADTGA |
| | (p.Asn1270Ser) | | | CTCCCCGGCCTTGGCCCAGGCA′] |
| 3348 | NM_000520.4(HEXA): c.1A > G | 3073 | HEXA | [′CTCCGAGAGGGGAGACCAGCGGGCCVTGA |
| | (p.Met1Val) | | | CAAGCTCCAGGCTTTGGTTTTC′] |
| 3349 | NM_000520.4(HEXA): c.611A > G | 3073 | HEXA | [′AATAAATTGAACGTGTTCCACTGGCRTCTG |
| | (p.His204Arg) | | | GTAGATGATCCTTCCTTCCCA′] |
| 3350 | NM_000356.3(TCOF1): c.149A > G | 6949 | TCOF1 | [′CAGCCCGTAACCCTTCTGGACATCTRTACA |
| | (p.Tyr50Cys) | | | CACTGGCAACAGTAAGTGGTG′] |
| 3351 | NM_000144.4(FXN): c.385 − 2A > G | 2395 | FXN | [′ATGCTTTTTTTCCACCTAATCCCCTRGAGT |
| | | | | GGTGTCTTAACTGTCAAACTG′] |
| 3352 | NM_016335.4(PRODH): c.1562A > | 5625 | PRODH | [′GCCTAGCAGCTGTCCAAAGTACACCYGGT |
| | G (p.Gln521Arg) | | | GGTCAGCAGGATGCAGGCCCAG′] |
| 3353 | NM_015474.3(SAMHD1): c.760A > | 25939 | SAMHD1 | [′TAATTCTAATGGAATTAAGCCTGTCRTGGA |
| | G (p.Met254Val) | | | ACAATATGGTCTCATCCCTGA′] |
| 3354 | NM_012464.4(TLL1): c.1885A > G | 7092 | TLL1 | [′ACTTCTTACCAAACTTAACGGCACCRTAAC |
| | (p.Ile629Val) | | | CACCCCTGGCTGGCCCAAGGA′] |
| 3355 | NM_000112.3(SLC26A2): c.1273A > | 1836 | SLC26A2 | [′GGAAATGTATGCCATTGGCTTTTGTRATAT |
| | G (p.Asn425Asp) | | | CATCCCTTCCTTCTTCCACTG′] |
| 3356 | NM_138691.2(TMC1): c.1960A > G | 117531 | TMC1 | [′CCTGTCCACAATGCCTGTCTTGTACRTGAT |
| | (p.Met654Val) | | | CGTGTCCCTCCCACCATCTTT′] |
| 3357 | NM_000173.6(GP1BA): c.763A > G | 2811 | GP1BA | [′GAAGCAAGGTGTGGACGTCAAGGCCRTGA |
| | (p.Met255Val) | | | CCTCTAATGTGGCCAGTGTGCA′] |
| 3358 | NM_024996.5(GFM1): c.521A > G | 85476 | GFM1 | [′AACGTTCCGTTTCTAACTTTTATTARCAAA |
| | (p.Asn174Ser) | | | TTGGACCGAATGGGCTCCAAC′] |
| 3359 | NM_024301.4(FKRP): c.926A > G | 79147 | FKRP | [′GTGGGCGACACGCCCGCCTACCTCTRCGA |
| | (p.Tyr309Cys) | | | GGAGCGCTGGACGCCCCCCTGC′] |
| 3360 | NM_024301.4(FKRP): c.1387A > G | 79147 | FKRP | [′TGCCGGCTTCGTGGCGCAGGCGCCTRACA |
| | (p.Asn463Asp) | | | ACTACCGCCGCTTCCTGGAGCT′] |
| 3361 | NM_021020.3(LZTS1): c.355A > G | 11178 | LZTS1 | [′TCCTTTTCCTCTACAGGGCTCCGAGRAGGG |
| | (p.Lys119Glu) | | | TGCAGTGAGGCCCACAGCCTT′] |
| 3362 | NM_001005741.2(GBA): c.1226A > | 2629 | GBA | [′CCAGCCGACCACATGGTACAGGAGGBTCT |
| | G (p.Asn409Ser) | | | AGGGTAAGGACAAAGGCAAAGA′] |
| 3363 | NM_000157.3(GBA): c.680A > G | 2629 | GBA | [′ACATCACCCACTTGGCTCAAGACCARTGG |
| | (p.Asn227Ser) | | | AGCGGTGAATGGGAAGGGGTCA′] |
| 3364 | NM_001005741.2(GBA): c.1049A > | 2629 | GBA | [′AAATATGTTCATGGCATTGCTGTACRTTGG |
| | G (p.His350Arg) | | | TACCTGGACTTTCTGGCTCCA′] |
| 3365 | NM_014239.3(E1F2B2): c.638A > G | 8892 | EIF2B2 | [′GTGAATTTGTCCAAAGCAGGTATTGRGAC |
| | (p.Glu213Gly) | | | AACTGTCATGACTGATGCTGCC′] |
| 3366 | NM_015915.4(ATL1): c.773A > G | 51062 | ATL1 | [′CTACAGAACGTCAGAAAACACATCCRTTC |
| | (p.His258Arg) | | | CTGTTTCACCAACATTTCCTGT′] |
| 3367 | NM_015915.4(ATL1): c.1222A > G | 51062 | ATL1 | [′GAAGCTATTCCGAGGGGTGAAGAAGRTGG |
| | (p.Met408Val) | | | GTGGGGAAGAATTTAGCCGGCG′] |
| 3368 | NM_022051.2(EGLN1): c.1121A > G | 54583 | EGLN1 | [′TTCTGGTCTGACCGTCGCAACCCTCRTGAA |
| | (p.His374Arg) | | | GTACAACCAGCATATGCTACA′] |
| 3369 | NM_015629.3(PRPF31): c.527 + 3A > | 26121 | PRPF31 | [′GTCACCGCCTCCACCACCCAGGGGTRTGTC |
| | G | | | CGCTTCGAGGGAGGCGCCGGG′] |
| 3370 | NM_001243133.1(NLRP3): c.1880A > | 114548 | NLRP3 | [′CTGCAGATCCAGCCCAGCCAGCTGGRATT |
| | G (p.Glu627Gly) | | | GTTCTACTGTTTGTACGAGATG′] |
| 3371 | NM_020919.3(ALS2): c.2980 − | 57679 | ALS2 | [′CTTATTGACGTTACTTTTTGCTCCTRGACA |
| | 2A > G | | | AAGTGGCTACGAGCTATAAGC′] |
| 3372 | NM_175073.2(APTX): c.602A > G | 54840 | APTX | [′GATAAATACCCAAAGGCCCGTTACCRTTG |
| | (p.His201Arg) | | | GCTGGTCTTACCGTGGACCTCC′] |
| 3373 | NM_001002010.2(NT5C3A): c.686A > | 51251 | NT5C3A | [′CATCCCAATGTCAAAGTTGTGTCCARTTTT |
| | G (p.Asn229Ser) | | | ATGGATTTTGATGAAACTGTA′] |
| 3374 | NM_020451.2(SEPN1): c.1A > G | 57190 | SEPN1 | [′CCGGCAGCCGCCGCCAGCCGCAGCCRTGG |
| | (p.Met1Val) | | | GCCGGGCCCGGCCGGGCCAACG′] |
| 3375 | NM_032667.6(BSCL2): c.263A > G | −1 | — | [′TCACTCTGCTCCTTCCCTGTTGCCARTGTCT |
| | (p.Asn88Ser) | | | CGCTGACTAAGGGTGGACGT′] |
| 3376 | NM_153638.2(PANK2): c.700A > G | 80025 | PANK2 | [′GGTATATTTTGAACCCAAAGACATCRCTGC |
| | (p.Thr234Ala) | | | TGAAGAAGAAGAGGAAGAAGT′] |
| 3377 | NM_025243.3(SLCl9A3): c.1264A > | 80704 | SLC19A3 | [′TGCCTTGGTGATTCAGACCATCATGRCTGT |
| | G (p.Thr422Ala) | | | GATTGTAGTAGATCAGAGAGG′] |
| 3378 | NM_025243.3(SLCl9A3): c.130A > | 80704 | SLC19A3 | [′TATCCCATATTTATCTGGACCAGATRAAAA |
| | G (p.Lys44Glu) | | | CCTGACCAGTGCAGAGGTAAG′] |
| 3379 | NM_031885.3(BBS2): c.209A > G | 583 | BBS2 | [′CAGACAGCTGACTGCCTGGTTAATGYTGA |
| | (p.Asn70Ser) | | | GAAGAGAAACATCAGATTCCAG′] |
| 3380 | NM_032383.4(HPS3): c.2482 − 2A > G | −1 | — | [′TTTATGAGAAATTCTTTTATGTTTTRGATA |
| | | | | AATGCCTGTAGTCATTATGGC′] |
| 3381 | NM_021830.4(C10orf2): c.955A > G | 56652 | C10orf2 | [′TGACCTTCGGTCCTGGGAAGCCGCCVAGTT |
| | (p.Lys319Glu) | | | GTTTGCACGAAAACTGAACCC′] |
| 3382 | NM_021830.4(C10orf2): c.1523A > | 56652 | C10orf2 | [′ACAATGCAACATGCAGTCTACGTCTRTGAC |
| | G (p.Tyr508Cys) | | | ATTTGTCATGTGATCATCGAC′] |
| 3383 | NM_006492.2(ALX3): c.608A > G | 257 | ALX3 | [′ACCTGCCCCCAGGTCTGGTTCCAGARCCGC |
| | (p.Asn203Ser) | | | AGAGCCAAGTGGCGGAAGCGC′] |
| 3384 | NM_174916.2(UBR1): c.407A > G | 197131 | UBR1 | [′TTCCAGGACAGTGTTCATAAAAATCRTCGT |
| | (p.His136Arg) | | | TACAAGGTAAGAAAATATAAC′] |
| 3385 | NM_015166.3(MLC1): c.422A > G | 23209 | MLC1 | [′CTAGTCCTGAACCCATCAGCAATAARCGT |
| | (p.Asn141Ser) | | | GAGTTCACACGAGCTTCGCGCA′] |
| 3386 | NM_013391.3(DMGDH): c.326A > | 29958 | DMGDH | [′CCTGGAATAAACTTGAAGAAAATACRTTA |
| | G (p.His109Arg) | | | TGATAGCATCAAACTTTATGAG′] |
| 3387 | NM_014795.3(ZEB2): c.3356A > G | 9839 | ZEB2 | [′GCTTACTTGCAGAGCATTACCCCTCRGGGG |
| | (p.Gln1119Arg) | | | TACTCTGACTCGGAGGAGAGG′] |
| 3388 | NM_000441.1(SLC26A4): c.1151A > | 5172 | SLC26A4 | [′GTTGTCATCCAGTCTCTTCCTTAGGRATTC |
| | G (p.Glu384Gly) | | | ATTGCCTTTGGGATCAGCAAC′] |
| 3389 | NM_000441.1(SLC26A4): c.1105A > | 5172 | SLC26A4 | [′TTATGCTATTGCAGTGTCAGTAGGARAAGT |
| | G (p.Lys369Glu) | | | ATATGCCACCAAGTATGATTA′] |
| 3390 | NM_000441.1(SLC26A4): c.2168A > | 5172 | SLC26A4 | [′AAGGACACATTCTTTTTGACGGTCCRTGAT |
| | G (p.His723Arg) | | | GCTATACTCTATCTACAGAAC′] |
| 3391 | NM_000441.1(SLC26A4): c.919 − | 5172 | SLC26A4 | [′TTTTTAACATCTTTTGTTTTATTTCRGACGA |
| | 2A > G | | | TAATTGCTACTGCCATTTCA′] |
| 3392 | NM_000197.1(HSD17B3): c.703A > | 3293 | HSD17B3 | [′GACCCCATATGCTGTCTCGACTGCARTGAC |
| | G (p.Met235Val) | | | AAAGTATCTAAATACAAATGT′] |
| 3393 | NM_000197.1(HSD17B3): c.389A > | 3293 | HSD17B3 | [′TTGTTTTGCTTCTTTCTGCCAGTCARCAATG |
| | G (p.Asn130Ser) | | | TCGGAATGCTTCCAAACCTT′] |
| 3394 | NM_022458.3(LMBR1): c.423 + 5252A > | 64327 | LMBR1 | [′GTTTTGATCTTAGTGTTTATTACAGRAAAT |
| | G | | | GAAGCCATATCTCACTAACTA′] |
| 3395 | NM_020366.3(RPGRIP1): c.3341A > | 57096 | RPGRIP1 | [′CTAAATAAACATTTTCCTTATCAGGRTTCA |
| | G (p.Asp1114Gly) | | | GAGAAGATGTGCATTGAAATT′] |
| 3396 | NM_021625.4(TRPV4): c.998A > G | 59341 | TRPV4 | [′CTGCATGCGCTGGTGGCCATTGCTGRCAAC |
| | (p.Asp333Gly) | | | ACCCGTGAGAACACCAAGTTT′] |
| 3397 | NM_004897.4(MINPP1): c.809A > G | 9562 | MINPP1 | [′TTAAAAAAAGTTGCAGCTACTTTGCRAGTG |
| | (p.Gln270Arg) | | | CCAGTAAATGATTTAAATGCA′] |
| 3398 | NM_020638.2(FGF23): c.211A > G | 8074 | FGF23 | [′TGGCGCACCCCATCAGACCATCTACRGTG |
| | (p.Ser71Gly) | | | AGTAGGGCTTCAGGCTGGGAAG′] |
| 3399 | NM_015071.4(ARHGAP26): c.1250A > | 23092 | ARHGAP26 | [′GGGCTGTATCGAATTGTGGGTGTCAVCTCC |
| | G (p.Asn417Ser) | | | AGAGTGCAGAAGTTGCTGAGT′] |
| 3400 | NM_021615.4(CHST6): c.521A > G | 4166 | CHST6 | [′CGCTCCTACAGCCACGTGGTGCTCARGGA |
| | (p.Lys174Arg) | | | GGTGCGCTTCTTCAACCTGCAG′] |
| 3401 | NM_021615.4(CHST6): c.329A > G | 4166 | CHST6 | [′TGCGACATGGACGTGTTTGATGCCTRTCTG |
| | (p.Tyr110Cys) | | | CCTTGGCGCCGCAACCTGTCC′] |
| 3402 | NM_015560.2(OPA1): c.1745A > G | 4976 | OPA1 | [′CTTGAAACTGAATGGAAGAATAACTRTCC |
| | (p.Tyr582Cys) | | | TCGCCTGCGGGAACTTGACCGG] |
| 3403 | NM_000368.4(TSC1): c.1760A > G | 7248 | TSC1 | [′AGTATCTTCACTCCCAGTCCTTGTARAATT |
| | (p.Lys587Arg) | | | CCACCTCCGACGAGAGTGGGC′] |
| 3404 | NM_020661.2(AICDA): c.415A > G | 57379 | AICDA | [′CCGCGCCGGGGTGCAAATAGCCATCRTGA |
| | (p.Met139Val) | | | CCTTCAAAGGTGCGAAAGGGCC′] |
| 3405 | NM_020533.2(MCOLN1): c.406 − | 57192 | MCOLN1 | [′ACAGGCCCTCCCCTTCTCTGCCCACRGTAC |
| | 2A > G | | | CTGGCGTTGCCTGACGTGTCA′] |
| 3406 | NM_021102.3(SPINT2): c.488A > G | 10653 | SPINT2 | [′AGGAACTCCTGCAATAACTTCATCTRTGGA |
| | (p.Tyr163Cys) | | | GGCTGCCGGGGCAATAAGAAC′] |
| 3407 | NM_006610.3(MASP2): c.359A > G | 10747 | MASP2 | [′GGGAGGGCTGGGGTTTCTCAGGGTCRGGG |
| - | (p.Asp120Gly) | | | GGTCCCCAAGGAGTAGCCAGGG′, |
| 3410 | | | | ′AGGGGCCAGGCTTGGCCAGGAGGGASATC |
| | | | | AGGCCTGGGTCTTGCCTTCACT′, |
| | | | | ′GGGCAGGAGAGCACAGACACGGAGCRGGC |
| | | | | CCCTGGCAAGGACACTTTCTAC′, |
| | | | | ′AGCCTGGACATTACCTTCCGCTCCGRCTAC |
| | | | | TCCAACGAGAAGCYGTTCACG′] |
| 3411 | NM_018965.3(TREM2): c.401A > G | 54209 | TREM2 | [′GCTCTGCCTCCCATAGACCCCCTGGRTCAC |
| | (p.Asp134Gly) | | | CGGGATGCTGGAGATCTCTGG′] |
| 3412 | NM_007375.3(TARDBP): c.1009A > | 23435 | TARDBP | [′AGCACTACAGAGCAGTTGGGGTATGRTGG |
| | G (p.Met337Val) | | | GCATGTTAGCCAGCCAGCAGAA′] |
| 3413 | NM_007375.3(TARDBP): c.506A > | 23435 | TARDBP | [′GTAATGTCACAGCGACATATGATAGRTGG |
| | G (p.Asp169Gly) | | | ACGATGGTGTGACTGCAAACTT′] |
| 3414 | NM_007375.3(TARDBP): c.1028A > | 23435 | TARDBP | [′GGTATGATGGGCATGTTAGCCAGCCRGCA |
| | G (p.Gln343Arg) | | | GAACCAGTCAGGCCCATCGGGT′] |
| 3415 | NM_007375.3(TARDBP): c.787A > | 23435 | TARDBP | [′CGTTCATATATCCAATGCCGAACCTRAGCA |
| | G (p.Lys263Glu) | | | CAATAGCAATAGACAGTTAGA′] |
| 3416 | NM_015247.2(CYLD): c.2240A > G | 1540 | CYLD | [′ATCAACAGTAACCTGAAATTTGCAGRGGT |
| | (p.Glu747Gly) | | | TAGTGATACTCACCTGTGGTAT′] |
| 3417 | NM_001128425.1(MUTYH): c.536A > | 4595 | MUTYH | [′AATCAACTCTGGGCTGGCCTGGGCTRCTAT |
| | G (p.Tyr179Cys) | | | TCTCGTGGCCGGCGGCTGCAG′] |
| 3418 | NM_001128425.1(MUTYH): c.1241A > | 4595 | MUTYH | [′TCCGTGACCTGGGAGCCCTCAGAGCRGCTT |
| | G (p.Gln414Arg) | | | CAGCGCAAGGCCCTGCTGCAG′] |
| 3419 | NM_170784.2(MKKS): c.110A > G | 8195 | MKKS | [′TTGAAAAGAATTGTAACATCATGCTRTGGC |
| | (p.Tyr37Cys) | | | CCCTCAGGTAGGCTGAAGCAG′] |
| 3420 | NM_170784.2(MKKS): c.169A > G | 8195 | MKKS | [′TGGCTTTGGAGGTTACGTGTGTACARCCTC |
| | (p.Thr57Ala) | | | ACAGTCCTCAGCTCTGCTCAG′] |
| 3421 | NM_004795.3(KL): c.578A > G | 9365 | KL | [′GTGCAGCCCGTGGTCACCCTGTACCRCTGG |
| | (p.His193Arg) | | | GACCTGCCCCAGCGCCTGCAG′] |
| 3422 | NM_014625.3(NPHS2): c.479A > G | 7827 | NPHS2 | [′CTTTTCTTTTTTTTGCCCTGCCTGGRTACCT |
| | (p.Asp160Gly) | | | ACCACAAGGTTGACCTTCGT′] |
| 3423 | NM_015713.4(RRM2B): c.322 − | 50484 | RRM2B | [′CACCTCCTGACTAAAGCGCTCCACCBAAG |
| | 2A > G | | | AAGATAAGGAAAATAGATATAT′] |
| 3424 | NM_006343.2(MERTK): c.1605 − | 10461 | MERTK | [′GAAGTATCTTTGTTTTCATTCACCCRGGAA |
| | 2A > G | | | TGCATTCACAGAGGAGGATTC′] |
| 3425 | NM_014585.5(SLC40A1): c.470A > | 30061 | SLC40A1 | [′GCTACTGCAATCACAATCCAAAGGGRTTG |
| | G (p.Asp157Gly) | | | GATTGTTGTTGTTGCAGGAGAA′] |
| 3426 | NM_004924.4(ACTN4): c.763A > G | 81 | ACTN4 | [′CGTGAACACGGCCCGGCCCGACGAGRAGG |
| | (p.Lys255Glu) | | | CCATAATGACCTATGTGTCCAG′] |
| 3427 | NM_012193.3(FZD4): c.1024A > G | −1 | — | [′CAAATGGGGTCATGAAGCCATTGAARTGC |
| | (p.Met342Val) | | | ACAGCTCTTATTTCCACATTGC′] |
| 3428 | NM_012193.3(FZD4): c.766A > G | −1 | — | [′GTTTTCCTACCCTGAGCGCCCCATCRTATT |
| | (p.Ile256Val) | | | TCTCAGTATGTGCTATAATAT′] |
| | NM_004239.3(TRIP11): c.202 − | 9321 | TRIP11 | |
| | 2A > G | | | |
| 3429 | NM_004239.3(TRIP11): c.2102A > G | 9321 | TRIP11 | [′AGTGTTTTTTTCCAGAGAAAGCTGAYTGTT |
| | (p.Asn701Ser) | | | ACCAGCAAGACATTCTTCTAA′] |
| 3430 | NM_012434.4(SLC17A5): c.548A > | 26503 | SLC17A5 | [′CAGGGTGTTACATTTCCAGCCATGCRTGCC |
| | G (p.His183Arg) | | | ATGTGGTCTTCTTGGGCTCCC′] |
| 3431 | NM_001099274.1(TINF2): c.838A > | 26277 | TINF2 | [′ATGGGCCTCCACTAGGGGAGGCCATDAGG |
| | G (p.Lys280Glu) | | | AGCGCCCCACAGTCATGCTGTT′] |
| 3432 | NM_012415.3(RAD54B): c.1778A > | 25788 | RAD54B | [′AGAGTTGAACAAAAGGCAGGGGTGAYTGC |
| | G (p.Asn593Ser) | | | ACAGTTTTTTAAGAGCTCCTAT′] |
| 3433 | NM_014946.3(SPAST): c.1688 − | 6683 | SPAST | [′TAAGTGCCTGACTTTTATGTTTTACRGAAC |
| | 2A > G | | | TAAAACCAGAACAGGTGAAGA′] |
| 3434 | NM_014946.3(SPAST): c.1322A > G | 6683 | SPAST | [′AGTCTTATACTTGTATTTCCTCTAGRTGAA |
| | (p.Asp441Gly) | | | GTTGATAGCCTTTTGTGTGAA′] |
| 3435 | NM_014946.3(SPAST): c.1245 + 4A > | 6683 | SPAST | [′TGCAAGTTTAACTTCAAAATACGTGRGTGC |
| | G | | | TCTGTTTCCAATATTGTCGTA′] |
| 3436 | NM_014946.3(SPAST): c.1157A > G | 6683 | SPAST | [′CTGTTACTCTTTGGTCCACCTGGGARTGGG |
| | (p.Asn386Ser) | | | AAGACAATGCTGGTAAGGGTT′] |
| 3437 | NM_014946.3(SPAST): c.1216A > G | 6683 | SPAST | [′AGAATCGAATGCAACCTTCTTTAATRTAAG |
| | (p.Ile406Val) | | | TGCTGCAAGTTTAACTTCAAA′] |
| 3438 | NM_182643.2(DLC1): c.2875A > G | 10395 | DLC1 | [′ACACCTGGATGTGGACAACGACCGARCCA |
| | (p.Thr959Ala) | | | CACCCAGCGACCTGGACAGCAC′] |
| 3439 | NM_194456.1(KRIT1): c.410A > G | 889 | KRIT1 | [′TGCCCAATTTTTTACTGCTTACAAGRTATT |
| | (p.Asp137Gly) | | | ATGCGAGTCTGTAGTGAATCC′] |
| 3440 | NM_005094.3(SLC27A4): c.899A > | 10999 | SLC27A4 | [′CCAGGAAACATCGTGGGAATCGGCCRGTG |
| | G (p.Gln300Arg) | | | CCTGCTGCATGGCATGACGGTG′] |
| 3441 | NM_004211.3(SLC6A5): c.1472A > | 9152 | SLC6A5 | [′GGAGGCCTGATCACTCTCTCTTCTTRCAAC |
| | G (p.Tyr491Cys) | | | AAATTCCACAACAACTGCTAC′] |
| 3442 | NM_004211.3(SLC6A5): c.1526A > | 9152 | SLC6A5 | [′GACACTCTAATTGTCACCTGCACCARCAGT |
| | G (p.Asn509Ser) | | | GCCACAAGCATCTTTGCCGGC′] |
| 3443 | NM_014270.4(SLC7A9): c.695A > G | 11136 | SLC7A9 | [′GCGTTTTACAATGGACTCTGGGCCTRTGAT |
| | (p.Tyr232Cys) | | | GGATGGTGAGGTGTCCTGAGA′] |
| 3444 | NM_139025.4(ADAMTS13): c.1582A > | 11093 | ADAMTS13 | [′GAGCCTGTGTGTGTCGGGCAGCTGCRGGG |
| | G (p.Arg528Gly) | | | TAGGCGTGTGTGGACATTGGCG′] |
| 3445 | NM_002894.2(RBBP8): c.1009A > G | 5932 | RBBP8 | [′TGTATTTGGAGCTACCTCTAGTATCRAAAG |
| | (p.Lys337Glu) | | | TGGTTTAGATTTGAATACAAG′] |
| 3446 | NM_005682.6(ADGRGl): c.263A > | 9289 | ADGRGl | [′TCCTTCCCTGACCCCAGGGGCCTCTRCCAC |
| | G (p.Tyr88Cys) | | | TTCTGCCTCTACTGGAACCGA′] |
| 3447 | NM_006502.2(POLH): c.1603A > G | 5429 | POLH | [′AGGAACTGAGCCCTTCTTTAAGCAGRAAA |
| | (p.Lys535Glu) | | | GTCTGCTTCTAAAGCAGAAACA′] |
| 3448 | NM_000334.4(SCN4A): c.4774A > G | 6329 | SCN4A | [′CATCTCCTTCCTCATCGTGGTCAACRTGTA |
| | (p.Met1592Val) | | | CATCGCCATCATCCTGGAGAA′] |
| 3449 | NM_000334.4(SCN4A): c.3478A > G | 6329 | SCN4A | [′CGCCCTCCTAGGCGCCATCCCCTCCRTCAT |
| | (p.Ile1160Val) | | | GAATGTGCTGCTTGTCTGCCT′] |
| 3450 | NM_000334.4(SCN4A): c.421A > G | 6329 | SCN4A | [′GTTCAGCATGTTCATCATGATCACCRTCTT |
| | (p.Ile141Val) | | | GACCAACTGCGTATTCATGAC′] |
| 3451 | NM_003907.2(EIF2B5): c.271A > G | 8893 | EIF2B5 | [′CCTGACTGCCACAGGTGTACAGGAARCAT |
| | (p.Thr91Ala) | | | TTGTCTTTTGTTGCTGGAAAGC′] |
| 3452 | NM_001128227.2(GNE): c.604A > G | 10020 | GNE | [′CAGTGCAGAGCAGCACCTGATATCCRTGT |
| | (p.Met202Val) | | | GTGAGGACCATGATCGCATCCT′] |
| 3453 | NM_001029.3(RPS26): c.1A > G | 6231 | RPS26 | [′CCTCTCTCCGGTCCGTGCCTCCAAGDTGGT |
| | (p.Met1Val) | | | GAGTCTTCTTGCGTGGTGAGG′] |
| 3454 | NM_012082.3(ZFPM2): c.1969A > G | −1 | — | [′TCAAACTAAGAAGCTCTCCACCTCCRGTAA |
| | (p.Ser657Gly) | | | CAATGATGACAAAATTAATGG′] |
| 3455 | NM_012082.3(ZFPM2): c.89A > G | 23414 | ZFPM2 | [′GATGAGGAAGAAGAATGTCCATCAGRGGA |
| | (p.Glu30Gly) | | | AACAGACATCATCTCCAAAGGA′] |
| 3456 | NM_012082.3(ZFPM2): c.2527A > G | −1 | — | [′AAAGTGTTTATCTCAGTCTGAGCGGRCGAC |
| | (p.Thr843Ala) | | | CACGTCTCCCAAAAGGCTGCT′] |
| 3457 | NM_194248.2(OTOF): c.766 − 2A > G | 9381 | OTOF | [′TCTGGCTCCCCCTTCTCCTGCCTGCRGGTC |
| | | | | AGCATCACGGTGATCGAGGCC′] |
| 3458 | NM_003705.4(SLC25A12): c.1769A > | 8604 | SLC25A12 | [′GCTCGAGTGTTTCGATCCTCTCCCCRGTTT |
| | G (p.Gln590Arg) | | | GGTGTTACCTTGGTCACTTAT′] |
| 3459 | NM_004621.5(TRPC6): c.428A > G | 7225 | TRPC6 | [′AATGCCCTACAGTTGGCAGTGGCCARTGA |
| | (p.Asn143Ser) | | | GCATCTGGAAATTACAGAACTT′] |
| 3460 | NM_152384.2(BBS5): c.522 + 3A > G | 129880 | BBS5 | [′TTTGGAATTTATCCAGTGATCAGGTRTTGT |
| | | | | GCAAAGAGCTAGTGAACCTTT′] |
| 3461 | NM_152384.2(BBS5): c.547A > G | 129880 | BBS5 | [′GGGCAATTTAGGAACCTTTTTTATTRCCAA |
| | (p.Thr183Ala) | | | TGTGAGAATTGTGTGGCATGC′] |
| 3462 | NM_001257342.1(BCS1L): c.232A > | 617 | BCS1L | [′CCACAGTACCCGTACTCAGCACCTCRGTGT |
| | G (p.Ser78Gly) | | | CGAGACTTCGTACCTTCAGCA′] |
| 3463 | NM_004328.4(BCS1L): c.148A > G | 617 | BCS1L | [′GGCATTCCGGCGCCATTACATGATCRCACT |
| | (p.Thr50Ala) | | | GGAAGTCCCTGCTCGAGACAG′] |
| 3464 | NM_003839.3(TNFRSF11A): c.508A > | 8792 | TNFRSF11A | [′TGCCTTTTCCTCCACGGACAAATGCRGACC |
| | G (p.Arg170Gly) | | | CTGGACCAAGTAAGTAACAAC′] |
| 3465 | NM_030761.4(WNT4): c.647A > G | 54361 | WNT4 | [′TGCCACGGGGTGTCAGGCTCCTGTGRGGT |
| | (p.Glu216Gly) | | | AAAGACGTGCTGGCGAGCCGTG′] |
| 3466 | NM_022817.2(PER2): c.1984A > G | 8864 | PER2 | [′GCTGGCACTGCCGGGCAAGGCAGAGRGTG |
| | (p.Ser662Gly) | | | TGGCGTCGCTCACCAGCCAGTG′] |
| 3467 | NM_002977.3(SCN9A): c.1964A > G | −1 | — | [′TAGGGCACGACCAATCAAATACACARGAA |
| | (p.Lys655Arg) | | | AAGGCGTTGTAGTTCCTATCTC′] |
| 3468 | NM_002977.3(SCN9A): c.184A > G | 6335 | SCN9A | [′GGAAGCTGGCAAACAGCTGCCCTTCRTCT |
| | (p.Ile62Val) | | | ATGGGGACATTCCTCCCGGCAT′] |
| 3469 | NM_002977.3(SCN9A): c.29A > G | 6335 | SCN9A | [′GCAATGTTGCCTCCCCCAGGACCTCRGAGC |
| | (p.Gln10Arg) | | | TTTGTCCATTTCACAAAACAG′] |
| 3470 | NM_001457.3(FLNB): c.604A > G | 2317 | FLNB | [′GCCTGTGGATAATGCACGAGAAGCCRTGC |
| | (p.Met202Val) | | | AGCAGGCAGATGACTGGCTGGG′] |
| 3471 | NM_003060.3(SLC22A5): c.632A > | 6584 | SLC22A5 | [′GTAGGCATGGGCCAGATCTCCAACTRTGT |
| | G (p.Tyr211Cys) | | | GGCAGCATTTGTCCTGGGTATG′] |
| 3472 | NM_000369.2(TSHR): c.1856A > G | 7253 | TSHR | [′CCGCAGTACAACCCAGGGGACAAAGRTAC |
| | (p.Asp619Gly) | | | CAAAATTGCCAAGAGGATGGCT′] |
| 3473 | NM_000369.2(TSHR): c.548A > G | 7253 | TSHR | [′TCTCTTCTCTCTGTTGGTTGTAGGARGCTG |
| | (p.Lys183Arg) | | | TACAACAATGGCTTTACTTCA′] |
| 3474 | NM_001430.4(EPAS1): c.1603A > G | 2034 | EPAS1 | [′GGAGACACTGGCACCCTATATCCCCRTGG |
| | (p.Met535Val) | | | ACGGGGAAGACTTCCAGCTAAG′] |
| 3475 | NM_024009.2(GJB3): c.421A > G | 2707 | GJB3 | [′GTTCAGCCTCATCTTCAAGCTCATCRTTGA |
| | (p.Ile141Val) | | | GTTCCTCTTCCTCTACCTGCT′] |
| 3476 | NM_024009.2(GJB3): c.497A > G | 2707 | GJB3 | [′ATGCCGCGCCTGGTGCAGTGTGCCADCGT |
| | (p.Asn166Ser) | | | GGCCCCCTGCCCCAACATCGTG′] |
| 3477 | NM_001080463.1(DYNC2H1): c.11284A > | 79659 | DYNC2H1 | [′TGTTTTTTTGCTTTTGTAGGTTGCCRTGGGT |
| | G (p.Met3762Val) | | | CAAGGTCAAGCTGATTTAGC′] |
| 3478 | NM_001080463.1(DYNC2H1): c.9044A > | 79659 | DYNC2H1 | [′CGCATGCCACCTGATGTAATTAGAGRTATT |
| | G (p.Asp3015Gly) | | | CTTGAAGGAGTTTTAAGGTTG′] |
| 3479 | NM_001080463.1(DYNC2H1): c.4610A > | 79659 | DYNC2H1 | [′GTTGACCCATCTCTGTTCCCTTCACRGGTA |
| | G (p.Gln1537Arg) | | | AGGGGGCTTACGTGTAGAAGC′] |
| 3480 | NM_001080463.1(DYNC2H1): c.5959A > | 79659 | DYNC2H1 | [′TGGTCCAAGTGGTGCTGGAAAATCARCGC |
| | G (p.Thr1987Ala) | | | TTTGGAGAATGTTAAGGGCTGC′] |
| 3481 | NM_007035.3(KERA): c.740A > G | 11081 | KERA | [′GTGGCCTTTTTGAGACTAAATCACARCAAA |
| | (p.Asn247Ser) | | | CTGTCAGATGAGGGTCTCCCA′] |
| 3482 | NM_003722.4(TP63): c.697A > G | 8626 | TP63 | [′TATCCGCGCCATGCCTGTCTACAAARAAGC |
| | (p.Lys233Glu) | | | TGAGCACGTCACGGAGGTGGT′] |
| 3483 | NM_003722.4(TP63): c.1052A > G | 8626 | TP63 | [′CGGATCTGTGCTTGCCCAGGAAGAGRCAG |
| | (p.Asp351Gly) | | | GAAGGCGGATGAAGATAGCATC′] |
| 3484 | NM_003722.4(TP63): c.1054A > G | 8626 | TP63 | [′GATCTGTGCTTGCCCAGGAAGAGACRGGA |
| | (p.Arg352Gly) | | | AGGCGGATGAAGATAGCATCAG′] |
| 3485 | NM_003742.2(ABCB11): c.890A > | 8647 | ABCB11 | [′AGAACAGTGGCTGCTTTTGGTGGTGRGAA |
| | G (p.Glu297Gly) | | | AAGAGAGGTTGAAAGGTTGGTT′] |
| 3486 | NM_006702.4(PNPLA6): c.3034A > | 10908 | PNPLA6 | [′GGACCTCACGTACCCAGTCACCTCCRTGTT |
| | G (p.Met1012Val) | | | CACTGGGTCTGCCTTTAACCG′] |
| 3487 | NM_006412.3(AGPAT2): c.589 − | 10555 | AGPAT2 | [′GTACACCACGGGGACGATGGGCACCYGCA |
| | 2A > G | | | GGCAGGGAGACGCACAGCTGAG′] |
| 3488 | NM_001084.4(PLOD3): c.668A > G | 8985 | PLOD3 | [′AAGTCTCGGATCTTTCAGAACCTCARCGGG |
| | (p.Asn223Ser) | | | GCTTTAGGTGAGGAGGAAGAC′] |
| 3489 | NM_138554.4(TLR4): c.896A > G | 7099 | TLR4 | [′GCATACTTAGACTACTACCTCGATGRTATT |
| | (p.Asp299Gly) | | | ATTGACTTATTTAATTGTTTG′] |
| 3490 | NM_001130978.1(DYSF): c.3892A > | 8291 | DYSF | [′GGGCCAGGTGCAGGAGACATCAAGGRTCC |
| | G (p.Ile1298Val) | | | TGGATGAGGTGAGCTGGGCGTG′] |
| 3491 | NM_001130978.1(DYSF): c.5264A > | 8291 | DYSF | [′CTTTTTTGTCTTCTCTCTGGGGCAGRGGCT |
| | G (p.Glu1755Gly) | | | GGCAGGATCCCAAACCCACAC′] |
| 3492 | NM_003494.3(DYSF): c.3443 − | 8291 | DYSF | [′CAGCTCTTAACCACTCCAGCCACTCRCTCT |
| | 33A > G | | | GGCACCTCTGTTTTTTCCCTT′] |
| 3493 | NM_003494.3(DYSF): c.1285 − | 8291 | DYSF | [′AACTTGTCCCCTCCCTGTGTCTTCTRGCTGT |
| | 2A > G | | | GCAGCAAGATCTTGGAGAAG′] |
| 3494 | NM_005450.4(NOG): c.665A > G | 9241 | NOG | [′CGCTGCGGCTGGATTCCCATCCAGTRCCCC |
| | (p.Tyr222Cys) | | | ATCATTTCCGAGTGCAAGTGC′] |
| 3495 | NM_004629.1(FANCG): c.925 − | 2189 | FANCG | [′GATACAATTTTTTTCTTTCTCTTTTRGGCCT |
| | 2A > G | | | TGAATGTCCCATGCAGTTCC′] |
| 3496 | NM_001701.3(BAAT): c.226A > G | 570 | BAAT | [′AGGGGATTATATGGGAGTCCACCCCRTGG |
| | (p.Met76Val) | | | GTCTCTTCTGGTCTCTGAAACC′] |
| 3497 | NM_006892.3(DNMT3B): c.2450A > | 1789 | DNMT3B | [′TTTGGCTTTCCTGTGCACTACACAGRCGTG |
| | G (p.Asp817Gly) | | | TCCAACATGGGCCGTGGTGCC′] |
| 3498 | NM_001360.2(DHCR7): c.839A > G | 1717 | DHCR7 | [′GCTGCTTCTGTCTTGCAGGCCATCTRCGTG |
| | (p.Tyr280Cys) | | | ATTGACTTCTTCTGGAACGAA′] |
| 3499 | NM_001360.2(DHCR7): c.1A > G | 1717 | DHCR7 | [′AAGGTTCTCTTTCTTGCAGGGCCCARTGGC |
| | (p.Met1Val) | | | TGCAAAATCGCAACCCAACAT′] |
| 3500 | NM_032119.3(ADGRV1): c.18131A > | 84059 | ADGRV1 | [′TATCATCAGAGCATGTCACAGATCTRTGGA |
| | G (p.Tyr6044Cys) | | | CTCATTCATGGTGACCTGTAA′] |
| 3501 | NM_004984.2(KIF5A): c.767A > G | 3798 | KIF5A | [′GTGCTGGACGAGGCAAAGAATATCARCAA |
| | (p.Asn256Ser) | | | GTCACTGTCAGCTCTGGGCAAT′] |
| 3502 | NM_004984.2(KIF5A): c.827A > G | 3798 | KIF5A | [′GTCTCCTTCCTCCCCCAGAAAAGCTRTGTT |
| | (p.Tyr276Cys) | | | CCATATCGTGACAGCAAAATG′] |
| 3503 | NM_007373.3(SHOC2): c.4A > G | 8036 | SHOC2 | [′TTTTGTCCAGGCTTGAGTCACCATGRGTAG |
| | (p.Ser2Gly) | | | TAGTTTAGGAAAAGAAAAAGA′] |
| 3504 | NM_016203.3(PRKAG2): c.1148A > | 51422 | PRKAG2 | [′TACTCCTTGATCAAAAATAAAATCCRCAG |
| | G (p.His383Arg) | | | ATTGCCCGTTATTGACCCTATC′] |
| 3505 | NM_016203.3(PRKAG2): c.1589A > | 51422 | PRKAG2 | [′GTCCTGCTTTTCTCTTTGCAGGTCCRTCGG |
| | G (p.His530Arg) | | | CTGGTGGTGGTAAATGAAGCA′] |
| 3506 | NM_003816.2(ADAM9): c.411 − | 8754 | ADAM9 | [′TTAAAATTTGTATACGTGTAATGCARCATT |
| | 8A > G | | | CAGAGGATTGCTGCATTTAGA′] |
| 3507 | NM_003002.3(SDHD): c.341A > G | 6392 | SDHD | [′GGCCTTGGACAAGTTGTTACTGACTRTGTT |
| | (p.Tyr114Cys) | | | CATGGGGATGCCTTGCAGAAA′] |
| 3508 | NM_003002.3(SDHD): c.149A > G | 6392 | SDHD | [′GAATGGTGTGGAGTGCAGCACATACRCTT |
| | (p.His50Arg) | | | GTCACCGAGCCACCATTGTATG′] |
| 3509 | NM_003002.3(SDHD): c.1A > G | 6392 | SDHD | [′ATGACCTTGAGCCCTCAGGAACGAGDTGG |
| | (p.Met1Val) | | | CGGTTCTCTGGAGGCTGAGTGC′] |
| 3510 | NM_002485.4(NBN): c.511A > G | 4683 | NBN | [′TCAGTAAAATATTCTGGCTTTACAAYTGGA |
| | (p.Ile171Val) | | | CGTCCACAAATGAGTGCACAT′] |
| 3511 | NM_170695.3(TGIF1): c.838A > G | 7050 | TGIF1 | [′TTCCTGTACAGCTGGGCCAAACCCARCCCT |
| | (p.Thr280Ala) | | | AGGGAGGCCACTGTCTCCTAA′] |
| 3512 | NM_002408.3(MGAT2): c.785A > G | 4247 | MGAT2 | [′CTTATACTTTTCCTAGAAGAGGATCRCTAC |
| | (p.His262Arg) | | | TTAGCCCCAGACTTTTACCAT′] |
| 3513 | NM_002408.3(MGAT2): c.952A > G | 4247 | MGAT2 | [′GAAAACTTGGAAATCCACAGAGCACRATA |
| | (p.Asn318Asp) | | | TGGGTCTAGCCTTGACCCGGAA′] |
| 3514 | NM_005422.2(TECTA): c.5609A > | 7007 | TECTA | [′CAGTCCAATGGCACGCATATCATGTRTAA |
| | G (p.Tyr1870Cys) | | | AAACACACTCTGGATCGAAAGC′] |
| 3515 | NM_012233.2(RAB3GAP1): c.649 − | 22930 | RAB3GAP1 | [′GGTATTGTCTTTGCATGTATTTCCTRGGGA |
| | 2A > G | | | TGTCCTTTAACTCCATTGCCT′] |
| 3516 | NM_005025.4(SERPINI1): c.1013A > | 5274 | SERPINI1 | [′GAGATTTTTCTTTCCAAAGCAATTCRCAAG |
| | G (p.His338Arg) | | | TCCTTCCTAGAGGTTAATGAA′] |
| 3517 | NM_001040667.2(HSF4): c.256A > | 3299 | HSF4 | [′AGACGGTTTTCGGAAGGTGGTGAGCRTCG |
| | G (p.Ile86Val) | | | AGCAGGGCGGCCTGCTTAGGCC′] |
| 3518 | NM_001008211.1(OPTN): c.1433A > | 10133 | OPTN | [′GTTTACTGTTCTGATTTTCATGCTGRAAGA |
| | G (p.Glu478Gly) | | | GCAGCGAGAGAGAAAATTCAT′] |
| 3519 | NM_000492.3(CFTR): c.2738A > G | 1080 | CFTR | [′GTGATTATCACCAGCACCAGTTCGTRTTAT |
| | (p.Tyr913Cys) | | | GTGTTTTACATTTACGTGGGA′] |
| 3520 | NM_000492.3(CFTR): c.3717 + 4A > | 1080 | CFTR | [′CTCAATAAGTCCTGGCCAGAGGGTGRGAT |
| | G | | | TTGAACACTGCTTGCTTTGTTA′] |
| 3521 | NM_000492.3(CFTR): c.1666A > G | 1080 | CFTR | [′ACTGAGTGGAGGTCAACGAGCAAGARTTT |
| | (p.Ile556Val) | | | CTTTAGCAAGGTGAATAACTAA′] |
| 3522 | NM_000492.3(CFTR): c.326A > G | 1080 | CFTR | [′TTACTGGGAAGAATCATAGCTTCCTRTGAC |
| | (p.Tyr109Cys) | | | CCGGATAACAAGGAGGAACGC′] |
| 3523 | NM_000492.3(CFTR): c.273 + 4A > G | 1080 | CFTR | [′TGGAATCTTTTTATATTTAGGGGTARGGAT |
| | | | | CTCATTTGTACATTCATTATG′] |
| 3524 | NM_000492.3(CFTR): c.3254A > G | 1080 | CFTR | [′CTGTTCCACAAAGCTCTGAATTTACRTACT |
| | (p.His1085Arg) | | | GCCAACTGGTTCTTGTACCTG′] |
| 3525 | NM_000492.3(CFTR): c.3700A > G | 1080 | CFTR | [′CATATTAGAGAACATTTCCTTCTCANTAAG |
| | (p.Ile1234Val) | | | TCCTGGCCAGAGGGTGAGATT′] |
| 3526 | NM_000492.3(CFTR): c.650A > G | 1080 | CFTR | [′GCACTCCTCATGGGGCTAATCTGGGRGTTG |
| | (p.Glu217Gly) | | | TTACAGGCGTCTGCCTTCTGT′] |
| 3527 | NM_001005360.2(DNM2): c.1684A > | 1785 | DNM2 | [′CCTCCACCCTCAGGAGAAAGAGAAGRAGT |
| | G (p.Lys562Glu) | | | ACATGCTGCCTCTGGACAACCT′] |
| 3528 | NM_001814.4(CTSC): c.857A > G | 1075 | CTSC | [′TCTCAGACCCCAATCCTAAGCCCTCRGGAG |
| | (p.Gln286Arg) | | | GTTGTGTCTTGTAGCCAGTAT′] |
| 3529 | NM_001814.4(CTSC): c.1235A > G | 1075 | CTSC | [′AATCATGCTGTTCTGCTTGTGGGCTRTGGC |
| | (p.Tyr412Cys) | | | ACTGACTCAGCCTCTGGGATG] |
| 3530 | NM_001814.4(CTSC): c.1040A > G | 1075 | CTSC | [′CGTTATTACTCCTCTGAGTACCACTRTGTA |
| | (p.Tyr347Cys) | | | GGAGGTTTCTATGGAGGCTGC′] |
| 3531 | NM_005144.4(HR): c.-218A > G | 55806 | HR | [′TCCGACCCCTCCAACCTGCGGCCCTRGAGC |
| | | | | GCCCCCGCCGCCCCGGGGGAA′] |
| 3532 | NM_172107.2(KCNQ2): c.851A > G | 3785 | KCNQ2 | [′ACCACCATTGGCTACGGGGACAAGTRCCC |
| | (p.Tyr284Cys) | | | CCAGACCTGGAACGGCAGGCTC′] |
| 3533 | NM_001303.3(COX10): c.1007A > G | 1352 | COX10 | [′GCCCTGAGCTGGGGCCTCCGTGAAGDCTA |
| | (p.Asp336Gly) | | | CTCCCGGGGCGGCTACTGCATG′] |
| 3534 | NM_006214.3(PHYH): c.135 − 2A > G | 5264 | PHYH | [′AGAACGTTATTATCCAGAGTATACCYAAA |
| | | | | GGAGAAAAAGAATCCCAAAATA′] |
| 3535 | NM_002284.3(KRT86): c.340A > G | −1 | — | [′GGAGAAGGAGCAGATCAAGTCCCTCVACA |
| | (p.Asn114Asp) | | | GCAGGTTCGCGGCCTTCATCGA′] |
| 3536 | NM_003865.2(HESX1): c.541A > G | 8820 | HESX1 | [′TCTAATGGCGAAAAAAAATTTCAACRCAA |
| | (p.Thr181Ala) | | | ATCTGCTGGAATAGATAGAAAA′] |
| 3537 | NM_000303.2(PMM2): c.563A > G | 5373 | PMM2 | [′TTTGATGTCTTTCCTGATGGATGGGRCAAG |
| | (p.Asp188Gly) | | | AGATACTGTCTGCGACATGTG′] |
| 3538 | NM_000288.3(PEX7): c.340 − | 5191 | PEX7 | [′TCTTTTGCTTTCTAAACACTTTTCARTGTTT |
| | 10A > G | | | TTAGGTGTATAGTGTTGATT′] |
| 3539 | NM_004044.6(ATIC): c.1277A > G | 471 | ATIC | [′CTCATCGTAGCCACCATTGCTGTCARGTAC |
| | (p.Lys426Arg) | | | ACTCAGTCTAACTCTGTGTGC′] |
| 3540 | NM_000314.6(PTEN): c.368A > G | 5728 | PTEN | [′GATGACAATCATGTTGCAGCAATTCRCTGT |
| | (p.His123Arg) | | | AAAGCTGGAAAGGGACGAACT′] |
| 3541 | NM_000314.6(PTEN): c.278A > G | 5728 | PTEN | [′GTTGCACAATATCCTTTTGAAGACCRTAAC |
| | (p.His93Arg) | | | CCACCACAGCTAGAACTTATC′] |
| 3542 | NM_000314.6(PTEN): c.755A > G | 5728 | PTEN | [′CCTCAGCCGTTACCTGTGTGTGGTGRTATC |
| | (p.Asp252Gly) | | | AAAGTAGAGTTCTTCCACAAA′] |
| 3543 | NM_018488.2(TBX4): c.1592A > G | 9496 | TBX4 | [′TCCTTGTCCCGAGAATCTTCCTTACRGTAC |
| | (p.Gln531Arg) | | | CATTCAGGAATGGGGACTGTG′] |
| 3544 | NM_000223.3(KRT12): c.403A > G | 3859 | KRT12 | [′AGAAACTATGCAAAATCTTAATGATRGAT |
| | (p.Arg135Gly) | | | TAGCTTCCTACCTGGATAAGGT′] |
| 3545 | NM_000503.5(EYA1): c.1639A > G | 2138 | EYA1 | [′TGAGAGAATAATTCAAAGGTTTGGARGAA |
| | (p.Arg547Gly) | | | AAGTGGTGTATGTTGTTATAGG′] |
| 3546 | NM_000261.1(MYOC): c.1010A > G | 4653 | MYOC | [′GTGTACTCGGGGAGCCTCTATTTCCRGGGC |
| | (p.Gln337Arg) | | | GCTGAGTCCAGAACTGTCATA′] |
| 3547 | NM_000261.1(MYOC): c.1267A > G | 4653 | MYOC | [′ACAAACCTGGGAGACAAACATCCGTRAGC |
| | (p.Lys423Glu) | | | AGTCAGTCGCCAATGCCTTCAT′] |
| 3548 | NM_000474.3(TWIST1): c.466A > G | 7291 | TWIST1 | [′GACCCTCAAGCTGGCGGCCAGGTACRTCG |
| | (p.Ile156Val) | | | ACTTCCTCTACCAGGTCCTCCA′] |
| 3549 | NM_001089.2(ABCA3): c.1702A > | 21 | ABCA3 | [′ACAGATCACCGTCCTGCTGGGCCACRACG |
| | G (p.Asn568Asp) | | | GTGCCGGGAAGACCACCACCCT′] |
| 3550 | NM_005055.4(RAPSN): c.-210A > G | 5913 | RAPSN | [′ATTCCTCAGAGGCCATGTGGCCCCARCTGG |
| | | | | CAGCGACAGCTGCAGACGGGC′] |
| 3551 | NM_198217.2(ING1): c.515A > G | 3621 | ING1 | [′AACGAACCCACGTACTGTCTGTGCARCCA |
| | (p.Asn172Ser) | | | GGTCTCCTATGGGGAGATGATC′] |
| 3552 | NM_000430.3(PAFAH1B1): c.446A > | 5048 | PAFAH1B1 | [′GATTTTGAACGAACTCTTAAAGGACRTAC |
| | G (p.His149Arg) | | | AGACTCTGTACAGGACATTTCA′] |
| 3553 | NM_000579.3(CCR5): c.-301 + | −1 | — | [′TACGGGGAGAGTGGAGAAAAAGGGGRCA |
| | 246A > G | | | CAGGGTTAATGTGAAGTCCAGGA′] |
| 3554 | NM_000264.3(PTCH1): c.2479A > G | −1 | — | [′ACTTTACGACCTACACAGGAGTTTCRGTAA |
| | (p.Ser827Gly) | | | CGTGAAGTATGTCATGTTGGA′] |
| 3555 | NM_001184.3(ATR): c.2022A > G | 545 | ATR | [′TCTGCTGCTGCAATAAGATAAAAAAYCCA |
| | (p.Gly674=) | | | CTAACACAACTAGCCCGGATTA′] |
| 3556 | NM_005982.3(SIX1): c.386A > G | 6495 | SIX1 | [′ATCTGGGACGGCGAGGAGACCAGCTRCTG |
| | (p.Tyr129Cys) | | | CTTCAAGGAGAAGTCGAGGGGT′] |
| 3557 | NM_006267.4(RANBP2): c.1966A > | 5903 | RANBP2 | [′AGAAGACGCACACATAACTTTTGCTRTATT |
| | G (p.Ile656Val) | | | GGATGCAGTAAATGGAAATAT′] |
| 3558 | NM_001001557.2(GDF6): c.1271A > | 392255 | GDF6 | [′CCGCCCAGCTGCTGCGTGCCCACCARATTG |
| | > G (p.Lys424Arg) | | | ACTCCCATCAGCATTCTATAC′] |
| 3559 | NM_000557.4(GDF5): c.517A > G | 8200 | GDF5 | [′ACCCCCCATCACACCCCACGAGTACVTGCT |
| | (p.Met173Val) | | | CTCGCTGTACAGGACGCTGTC′] |
| 3560 | NM_000392.4(ABCC2): c.4145A > | 1244 | ABCC2 | [′CGAGAGAAGCTGACCATCATCCCCCRGGT |
| | G (p.Gln1382Arg) | | | GAGCTCTAGAACTTACTCGGGC′] |
| 3561 | NM_000396.3(CTSK): c.990A > G | 1513 | CTSK | [′ACCTGGCCAGCTTCCCCAAGATGTGRCTCC |
| | (p.Ter330Trp) | | | AGCCAGCCAAATCCATCCTGC′] |
| 3562 | NM_001127221.1(CACNA1A): c.4151A > | 773 | CACNA1A | [′AACGTCTTCAACATCCTCATCGTCTRCATG |
| | G (p.Tyr1384Cys) | | | CTATTCATGTTCATCTTCGCC′] |
| 3563 | NM_000178.2(GSS): c.656A > G | 2937 | GSS | [′CAAGAGAAGGAAAGAAACATATTTGRCCA |
| | (p.Asp219Gly) | | | GCGTGCCATAGAGAATGAGCTA′] |
| 3564 | NM_000901.4(NR3C2): c.2327A > G | 4306 | NR3C2 | [′ACGCTCAACCGCTTAGCAGGCAAACRGAT |
| | (p.Gln776Arg) | | | GATCCAAGTCGTGAAGTGGGCA′] |
| 3565 | NM_000901.4(NR3C2): c.2915A > G | 4306 | NR3C2 | [′ATCAGCGACCAGCTGCCCAAGGTGGRGTC |
| | (p.Glu972Gly) | | | GGGGAACGCCAAGCCGCTCTAC′] |
| 3566 | NM_004407.3(DMP1): c.1A > G | 1758 | DMP1 | [′CCAGGTAGAGGTATCACACCCAACTRTGA |
| | (p.Met1Val) | | | AGATCAGCATCCTGCTCATGTT′] |
| 3567 | NM_004999.3(MYO6): c.737A > G | 4646 | MYO6 | [′CAAGGCAAAGAGGAAAGAAATTATCRTAT |
| | (p.His246Arg) | | | CTTTTATAGGTTGTGTGCTGGT′] |
| 3568 | NM_000256.3(MYBPC3): c.175A > | 4607 | MYBPC3 | [′CGCCAGCAACAAGTACGGCCTGGCCRCAG |
| | G (p.Thr59Ala) | | | AGGGCACACGGCATACGCTGAC′] |
| 3569 | NM_000163.4(GHR): c.594A > G | 2690 | GHR | [′TGGAGTATGAACTTCAATACAAAGARGTA |
| | (p.Glu198=) | | | AATGAAACTAAATGGAAAATGG′] |
| 3570 | NM_000525.3(KCNJ11): c.509A > G | 3767 | KCNJ11 | [′ATCATGCTTGGCTGCATCTTCATGARGACT |
| | (p.Lys170Arg) | | | GCCCAAGCCCACCGCAGGGCT′] |
| 3571 | NM_000525.3(KCNJ11): c.776A > G | 3767 | KCNJ11 | [′CTGGTGGCCCCGCTGATCATCTACCRTGTC |
| | (p.His259Arg) | | | ATTGATGCCAACAGCCCACTC′] |
| 3572 | NM_000182.4(HADHA): c.180 + 3A > | 3030 | HADHA | [′GAAAAAAACTGCAAATTAAATGAGAYACC |
| | G | | | TTTGAATTGGGAGAGTTAATTC′] |
| 3573 | NM_005263.3(GFI1): c.1145A > G | 2672 | GFI1 | [′GGCAAGGCATTCAGCCAGAGCTCCARCCT |
| | (p.Asn382Ser) | | | CATCACCCACAGCCGCAAACAC′] |
| 3574 | NM_005263.3(GFI1): c.1208A > G | 2672 | GFI1 | [′CCCTTCGGCTGCGACCTCTGTGGGARGGGT |
| | (p.Lys403Arg) | | | TTCCAGAGGAAGGTGGACCTC′] |
| 3575 | NM_001893.4(CSNK1D): c.130A > | 1453 | CSNK1D | [′TGCCATCAAGCTTGAATGTGTCAAARCCA |
| | G (p.Thr44Ala) | | | AACACCCTCAGCTCCACATTGA′] |
| 3576 | NM_006204.3(PDE6C): c.1363A > G | 5146 | PDE6C | [′AAACAGAAAGGACATTGCTCAGGAARTGC |
| | (p.Met455Val) | | | TCATGAACCAAACCAAAGCCAC′] |
| 3577 | NM_006204.3(PDE6C): c.1483 − | 5146 | PDE6C | [′TGAAACAACCCATCCTTATTTCAACRGAAA |
| | 2A > G | | | GAGGACTTGCCAGACCCACGC′] |
| 3578 | NM_003476.4(CSRP3): c.206A > G | 8048 | CSRP3 | [′TGCTATGGGCGCAGATATGGCCCCARAGG |
| | (p.Lys69Arg) | | | GATCGGGTATGGACAAGGCGCT′] |
| 3579 | NM_005591.3(MRE11A): c.350A > | 4361 | MRE11A | [′GTGAACTATCAAGATGGCAACCTCARCAT |
| | G (p.Asn117Ser) | | | TTCAATTCCAGTGTTTAGTATT′] |
| 3580 | NM_000107.2(DDB2): c.730A > G | 1643 | DDB2 | [′TTGGAATCTCAGAATGCACAAAAAGRAAG |
| | (p.Lys244Glu) | | | TGACGCATGTGGCCCTGAACCC′] |
| 3581 | NM_001204.6(BMPR2): c.1454A > | 659 | BMPR2 | [′AAGGAGACAATCGAAGACTGTTGGGRCCA |
| | G (p.Asp485Gly) | | | GGATGCAGAGGCTCGGCTTACT′] |
| 3582 | NM_000336.2(SCNN1B): c.863A > | 6338 | SCNN1B | [′ACAGAGAAGGCACTTCCTTCGGCCARCCC |
| | G (p.Asn288Ser) | | | TGGAACTGAATTCGGTGAGTTT′] |
| 3583 | NM_000447.2(PSEN2): c.715A > G | 5664 | PSEN2 | [′CTACCTCATCATGATCAGTGCGCTCRTGGC |
| | (p.Met239Val) | | | CCTAGTGTTCATCAAGTACCT′] |
| 3584 | NM_002181.3(IHH): c.284A > G | 3549 | IHH | [′CCAGACATCATCTTCAAGGACGAGGRGAA |
| | (p.Glu95Gly) | | | CACAGGCGCCGACCGCCTCATG′] |
| 3585 | NM_000310.3(PPT1): c.236A > G | 5538 | PPT1 | [′ACTTCTCTCTGGCTTCTTTTTTAGGRCGTGG |
| | (p.Asp79Gly) | | | AGAACAGCTTCTTCTTGAAT′] |
| 3586 | NM_003051.3(SLCl6A1): c.610A > | 6566 | SLC16A1 | [′GCGACCAATCGGGCCCAAGCCAACCRAGG |
| | G (p.Lys204Glu) | | | CAGGGAAAGATAAGTCTAAAGC′] |
| 3587 | NM_005587.2(MEF2A): c.788A > G | 4205 | MEF2A | [′TCTCCCCCTCCACCAGGTGGTGGTARTCTT |
| | (p.Asn263Ser) | | | GGAATGAACAGTAGGAAACCA′] |
| 3588 | NM_000098.2(CPT2): c.638A > G | 1376 | CPT2 | [′TACCTGGTCAATGCGTATCCCCTGGRTATG |
| | (p.Asp213Gly) | | | TCCCAGTATTTTCGGCTTTTC′] |
| 3589 | NM_000098.2(CPT2): c.359A > G | 1376 | CPT2 | [′TTTTTAGGACCCTGGTTTGATATGTRCCTA |
| | (p.Tyr120Cys) | | | TCTGCTCGAGACTCCGTTGTT′] |
| 3590 | NM_001079668.2(NKX2-1): c.464 − | 7080 | NKX2-1 | [′TCGCCGGGCCCATGAAGCGGGAGACHGTA |
| | 2A > G | | | AGCGACAAACGCACAGCGTCGG′] |
| 3591 | NM_004387.3(NKX2-5): c.896A > G | 1482 | NKX2-5 | [′AACTTCGTGAACTTCGGCGTCGGGGRCTTG |
| | (p.Asp299Gly) | | | AATGCGGTTCAGAGCCCCGGG′] |
| 3592 | NM_004387.3(NKX2-5): c.547A > G | 1482 | NKX2-5 | [′GCTGAAACTCACGTCCACGCAGGTCRAGA |
| | (p.Lys183Glu) | | | TCTGGTTCCAGAACCGGCGCTA′] |
| 3593 | NM_178138.4(LHX3): c.332A > G | 8022 | LHX3 | [′GTGCGCCGCGCCCAGGACTTCGTGTRCCAC |
| | (p.Tyr111Cys) | | | CTGCACTGCTTTGCCTGCGTC′] |
| 3594 | NM_001698.2(AUH): c.263 − 2A > G | 549 | AUH | [′CTTGTACTTTTTTTCCCCTTTAACTRGGAAT |
| | | | | TGTGGTGCTTGGAATAAACA′] |
| 3595 | NM_001698.2(AUH): c.943 − 2A > G | 549 | AUH | [′ACATATTTAATATTTTGTTTTTCTTRGACCA |
| | | | | TTCCAACAAAAGACAGACTT′] |
| 3596 | NM_001876.3(CPT1A): c.1361A > G | 1374 | CPT1A | [′ATGTGTGTTTCACGTAGGTGGTTTGRCAAG |
| | (p.Asp454Gly) | | | TCGTTCACGTTTGTTGTCTTC′] |
| 3597 | NM_001876.3(CPT1A): c.1079A > G | 1374 | CPT1A | [′CGGCTGCTGAAGCCCCGGGAGATGGRGCA |
| | (p.Glu360Gly) | | | GCAGATGCAGAGGATCCTGGAC′] |
| 3598 | NM_001876.3(CPT1A): c.1493A > G | 1374 | CPT1A | [′TCCATTGACAGCCTCCAGCTGGGCTRTGCG |
| | (p.Tyr498Cys) | | | GAGGATGGGCACTGCAAAGGC′] |
| 3599 | NM_000352.4(ABCC8): c.4270A > | 6833 | ABCC8 | [′CACCCTGCGCTCACGCCTCTCCATCRTCCT |
| | G (p.Ile1424Val) | | | GCAGGACCCCGTCCTCTTCAG′] |
| 3600 | NM_000352.4(ABCC8): c.215A > G | 6833 | ABCC8 | [′ACATGGCTTCATTTCCCTGGGCACARCCTG |
| | (p.Asn72Ser) | | | CGGTGGATCCTGACCTTCATG′] |
| 3601 | NM_002180.2(IGHMBP2): c.638A > | 3508 | IGHMBP2 | [′TCTCAGAAAGAACTTGCCATCATCCRTGGA |
| | G (p.His213Arg) | | | CCTCCTGGCACTGGGAAAACC′] |
| 3602 | NM_033163.3(FGF8): c.298A > G | 2253 | FGF8 | [′GAAGCACGTGCAGGTCCTGGCCAACRAGC |
| | (p.Lys100Glu) | | | GCATCAACGCCATGGCAGAGGA′] |
| 3603 | NM_006180.4(NTRK2): c.2165A > | 4915 | NTRK2 | [′TCCCGGGACGTGTACAGCACTGACTRCTAC |
| | G (p.Tyr722Cys) | | | AGGGTGAGTAGCTGTGCAGAT′] |
| 3604 | NM_033028.4(BBS4): c.157 − 2A > G | 585 | BBS4 | [′TCAGAAGCATTTTTCTCCCTCTTTCRGGCT |
| | | | | GTTATCAAAGAACAGCTTCAA′] |
| 3605 | NM_000409.3(GUCA1A): c.296A > | 2978 | GUCA1A | [′AAGCTCCGCTGGTACTTCAAGCTCTRTGAT |
| | G (p.Tyr99Cys) | | | GTAGATGGCAACGGCTGCATT′] |
| 3606 | NM_000344.3(SMN1): c.815A > G | 6606 | SMN1 | [′TTAATTTCATGGTACATGAGTGGCTRTCAT |
| | (p.Tyr272Cys) | | | ACTGGCTATTATATGGTAAGT′] |
| 3607 | NM_000344.3(SMN1): c.784A > G | 6606 | SMN1 | [′TCTTGATGATGCTGATGCTTTGGGARGTAT |
| | (p.Ser262Gly) | | | GTTAATTTCATGGTACATGAG′] |
| 3608 | NM_000095.2(COMP): c.1358A > G | 1311 | COMP | [′CGGGACAACTGTCCCACGGTGCCTARCAG |
| | (p.Asn453Ser) | | | TGCCCAGGAGGACTCAGACCAC] |
| 3609 | NM_000095.2(COMP): c.1418A > G | 1311 | COMP | [′GGTGATGCCTGCGACGACGACGACGRCAA |
| | (p.Asp473Gly) | | | TGACGGAGTCCCTGACAGTCGG] |
| 3610 | NM_002047.2(GARS): c.374A > G | 2617 | GARS | [′GATATTGTAGACCGAGCAAAAATGGRAGA |
| | (p.Glu125Gly) | | | TACCCTGAAGAGGAGGTTTTTC′] |
| 3611 | NM_001166107.1(HMGCS2): c.500A > | 3158 | HMGCS2 | [′GGCATAGATACCACCAATGCCTGCTRCGG |
| | G (p.Tyr167Cys) | | | TGGTACTGCCTCCCTCTTCAAT′] |
| 3612 | NM_000161.2(GCH1): c.671A > G | 2643 | GCH1 | [′CGAGGTGTACAGAAAATGAACAGCARAAC |
| | (p.Lys224Arg) | | | TGTGACCAGCACAATGTTGGGT′] |
| 3613 | NM_001024630.3(RUNX2): c.598A > | 860 | RUNX2 | [′ATCTGCAGGCAAGAGTTTCACCTTGRCCAT |
| | G (p.Thr200Ala) | | | AACCGTCTTCACAAATCCTCC′] |
| 3614 | NM_000423.2(KRT2): c.556A > G | 3849 | KRT2 | [′AGAGCGTGAGCAGATCAAAACTCTCDACA |
| | (p.Asn186Asp) | | | ACAAATTTGCCTCCTTCATTGA′] |
| 3615 | NM_000215.3(JAK3): c.299A > G | 3718 | JAK3 | [′GATGCCAGCACCCAAGTCCTGCTGTRCAG |
| | (p.Tyr100Cys) | | | GATTCGGTAGGAAGTGCCCCCC′] |
| 3616 | NM_000335.4(SCN5A): c.3971A > G | 6331 | SCN5A | [′CTCTGTCCACTTGAGGTGGTGGTCARTGCC |
| | (p.Asn1324Ser) | | | CTGGTGGGCGCCATCCCGTCC′] |
| 3617 | NM_000335.4(SCN5A): c.5381A > G | 6331 | SCN5A | [′AGTGAGGACGACTTCGATATGTTCTRTGAG |
| | (p.Tyr1794Cys) | | | ATCTGGGAGAAATTTGACCCA] |
| 3618 | NM_001014797.2(KCNMA1): c.1301A > | 3778 | KCNMA1 | [′AAGGACTTTCTGCACAAGGACCGGGRTGA |
| | G (p.Asp434Gly) | | | CGTCAATGTGGAGATCGTTTTT′] |
| 3619 | NM_004380.2(CREBBP): c.3524A > | 1387 | CREBBP | [′TATAATCGCAAGACATCCCGAGTCTRTAA |
| | G (p.Tyr1175Cys) | | | GTTTTGCAGTAAGCTTGCAGAG′] |
| 3620 | NM_000023.2(SGCA): c.410A > G | 6442 | SGCA | [′GGCCCCCTGCTGCCATACCAAGCCGRGTTC |
| | (p.Glu137Gly) | | | CTGGTGCGCAGCCACGATGCG′] |
| 3621 | NM_002835.3(PTPN12): c.182A > G | 5782 | PTPN12 | [′GGAGAAAAAGAAGAAAATGTTAAAARGA |
| | (p.Lys61Arg) | | | ACAGATACAAGGACATACTGCCA′] |
| 3622 | NM_000211.4(ITGB2): c.1052A > G | 3689 | ITGB2 | [′GGGGAGCTGTCTGAGGACTCCAGCARTGT |
| | (p.Asn351Ser) | | | GGTCCAACTCATTAAGAATGCT′] |
| 3623 | NM_005502.3(ABCA1): c.1790A > | 19 | ABCA1 | [′GTCTGGGGGGGCTTCGCCTACTTGCRGGAT |
| | G (p.Gln597Arg) | | | GTGGTGGAGCAGGCAATCATC′] |
| 3624 | NM_005502.3(ABCA1): c.2804A > | 19 | ABCA1 | [′CAGATCACCTCCTTCCTGGGCCACARTGGA |
| | G (p.Asn935Ser) | | | GCGGGGAAGACGACCACCATG′] |
| 3625 | m.5843A > G | 4579 | MT-TY | [′CTCGGAGCTGGTAAAAAGAGGCCTARCCC |
| | | | | CTGTCTTTAGATTTACAGTCCA′] |
| 3626 | m.7445A > G | −1 | — | [′AAGAACCCGTATACATAAAATCTAGVCAA |
| | | | | AAAAGGAAGGAATCGAACCCCC′] |
| 3627 | m.8344A > G | 4566 | MT-TK | [′ACCTTTTAAGTTAAAGATTAAGAGARCCA |
| | | | | ACACCTCTTTACAGTGAAATGC′] |
| 3628 | m.8296A > G | 4566 | MT-TK | [′ACCCCCTCTACCCCCTCTAGAGCCCRCTGT |
| | | | | AAAGCTAACTTAGCATTAACC′] |
| 3629 | m.12320A > G | 4568 | MT-TL2 | [′TCTTAGGCCCCAAAAATTTTGGTGCRACTC |
| | | | | CAAATAAAAGTAATAACCATG′] |
| 3630 | m.3243A > G | 4567 | MT-TL1 | [′AGAACAGGGTTTGTTAAGATGGCAGRGCC |
| | | | | CGGTAATCGCATAAAACTTAAA′] |
| 3631 | m.3252A > G | 4567 | MT-TL1 | [′TTTGTTAAGATGGCAGAGCCCGGTARTCGC |
| | | | | ATAAAACTTAAAACTTTACAG′] |
| 3632 | m.3251A > G | 4567 | MT-TL1 | [′GTTTGTTAAGATGGCAGAGCCCGGTRATC |
| | | | | GCATAAAACTTAAAACTTTACA′] |
| 3633 | m.3260A > G | 4567 | MT-TL1 | [′GATGGCAGAGCCCGGTAATCGCATARAAC |
| | | | | TTAAAACTTTACAGTCAGAGGT′] |
| 3634 | m.3274A > G | 4567 | MT-TL1 | [′GTAATCGCATAAAACTTAAAACTTTRCAGT |
| | | | | CAGAGGTTCAATTCCTCTTCT′] |
| 3635 | m.4317A > G | 4565 | MT-TI | [′GATAGAGTAAATAATAGGAGCTTAARCCC |
| | | | | CCTTATTTCTAGGACTATGAGA′] |
| 3636 | m.4269A > G | 4565 | MT-TI | [′GCATTCCCCCTCAAACCTAAGAAATRTGTC |
| | | | | TGATAAAAGAGTTACTTTGAT′] |
| 3637 | m.4295A > G | 4565 | MT-TI | [′TGTCTGATAAAAGAGTTACTTTGATRGAGT |
| | | | | AAATAATAGGAGCTTAAACCC′] |
| 3638 | m.4300A > G | 4565 | MT-TI | [′GATAAAAGAGTTACTTTGATAGAGTRAAT |
| | | | | AATAGGAGCTTAAACCCCCTTA′] |
| 3639 | m.10044A > G | 4563 | MT-TG | [′CTTCCAATTAACTAGTTTTGACAACRTTCA |
| | | | | AAAAAGAGTAATAAACTTCGC′] |
| 3640 | m.7526A > G | 4555 | MT-TD | [′TCCATGACTTTTTCAAAAAGGTATTRGAAA |
| | | | | AACCATTTCATAACTTTGTCA′] |
| 3641 | m.10438A > G | 4573 | MT-TR | [′AGTTTAAACAAAACGAATGATTTCGRCTC |
| | | | | ATTAAATTATGATAATCATATT′] |
| 3642 | m.1555A > G | 4549 | MT-RNR1 | [′ACCCCTACGCATTTATATAGAGGAGRCAA |
| | | | | GTCGTAACATGGTAAGTGTACT′] |
| 3643 | m.827A > G | 4549 | MT-RNR1 | [′CACCCCCACGGGAAACAGCAGTGATNARC |
| | | | | CTTTAGCAATAAACGAAAGTTT′] |
| 3644 | m.15579A > G | 4519 | MT-CYB | [′CCCGAATGATATTTCCTATTCGCCTRCACA |
| | | | | ATTCTCCGATCCGTCCCTAAC′] |
| 3645 | m.14495A > G | 4541 | MT-ND6 | [′TCCAAAGACAACCATCATTCCCCCTRAATA |
| | | | | AATTAAAAAAACTATTAAACC′] |
| 3646 | m.12770A > G | 4540 | MT-ND5 | [′CTATTCCAACTGTTCATCGGCTGAGRGGGC |
| | | | | GTAGGAATTATATCCTTCTTG′] |
| 3647 | m.11084A > G | 4538 | MT-ND4 | [′CTCCCTACAAATCTCCTTAATTATARCATT |
| | | | | CACAGCCACAGAACTAATCAT′] |
| 3648 | m.3397A > G | 4535 | MT-ND1 | [′TACCGAACGAAAAATTCTAGGCTATRTAC |
| | | | | AACTACGCAAAGGCCCCAACGT′] |
| 3649 | m.4136A > G | 4535 | MT-ND1 | [′CTGTTCTTATGAATTCGAACAGCATRCCCC |
| | | | | CGATTCCGCTACGACCAACTC′] |
| 3650 | m.3796A > G | 4535 | MT-ND1 | [′CCGTTTACTCAATCCTCTGATCAGGNTGAG |
| - | | | | CATCAAACTCAAACTACGCCC′, |
| 3654 | | | | ′AATAAGTGGCTCCTTTAACCTCTCCDCCCTT |
| | | | | ATCACAACACAAGAACACCT′, |
| | | | | ′ACCCCCTTGACCTTGCCGAAGGGGANTCCG |
| | | | | AACTAGTCTCAGGCTTCAACA′, |
| | | | | ′CGAATACGCCGCAGGCCCCTTCGCCNTATT |
| | | | | CTTCATAGCCGAATACACAAA′, |
| | | | | ′ATTTTGTCACCAAGACCCTACTTCTNACCTC |
| | | | | CCTGTTCTTATGAATTCGAA′] |
| 3655 | NM_003334.3(UBA1): c.1639A > G | 7317 | UBA1 | [′AATGAATCCACATATCCGGGTGACARGCC |
| | (p.Ser547Gly) | | | ACCAGAACCGTGTGGGTCCTGA′] |
| 3656 | NM_000354.5(SERPINA7): c.623 − | 6906 | SERPINA7 | [′GATCAAAAGGATTTGCCCACTGGGCYTAA |
| | 2A > G | | | AATACAAAGAAAAGAGAGGTGT′] |
| 3657 | NM_000044.3(AR): c.2291A > G | 367 | AR | [′ACCAATGTCAACTCCAGGATGCTCTRCTTC |
| | (p.Tyr764Cys) | | | GCCCCTGATCTGGTTTTCAAT′] |
| 3658 | NM_000044.3(AR): c.2362A > G | 367 | AR | [′CCGGATGTACAGCCAGTGTGTCCGARTGA |
| | (p.Met788Val) | | | GGCACCTCTCTCAAGAGTTTGG′] |
| 3659 | NM_000044.3(AR): c.2632A > G | 367 | AR | [′GATTGCGAGAGAGCTGCATCAGTTCRCTTT |
| | (p.Thr878Ala) | | | TGACCTGCTAATCAAGTCACA′] |
| 3660 | NM_000044.3(AR): c.2708A > G | 367 | AR | [′ATGATGGCAGAGATCATCTCTGTGCRAGT |
| | (p.Gln903Arg) | | | GCCCAAGATCCTTTCTGGGAAA′] |
| 3661 | NM_002764.3(PRPS1): c.341A > G | 5631 | PRPS1 | [′CCAATCTCAGCCAAGCTTGTTGCAARTATG |
| | (p.Asn114Ser) | | | CTATCTGTAGCAGGTGCAGAT′] |
| 3662 | NM_000194.2(HPRT1): c.602A > G | 3251 | HPRT1 | [′CTTGACTATAATGAATACTTCAGGGRTTTG |
| | (p.Asp201Gly) | | | AATGTAAGTAATTGCTTCTTT′] |
| 3663 | NM_000194.2(HPRT1): c.155A > G | 3251 | HPRT1 | [′TGTAGGACTGAACGTCTTGCTCGAGRTGTG |
| | (p.Asp52Gly) | | | ATGAAGGAGATGGGAGGCCAT′] |
| 3664 | NM_000132.3(F8): c.872A > G | 2157 | F8 | [′CCTGAAGTGCACTCAATATTCCTCGRAGGT |
| | (p.Glu291Gly) | | | CACACATTTCTTGTGAGGAAC′] |
| 3665 | NM_000132.3(F8): c.5183A > G | 2157 | F8 | [′GCTGCAGTGGAGAGGCTCTGGGATTRTGG |
| | (p.Tyr1728Cys) | | | GATGAGTAGCTCCCCACATGTT′] |
| 3666 | NM_000132.3(F8): c.5821A > G | 2157 | F8 | [′TTCTCTGTGTCCTTCTCCAGCAATCRATGG |
| | (p.Asn1941Asp) | | | CTACATAATGGATACACTACC] |
| 3667 | NM_000132.3(F8): c.328A > G | 2157 | F8 | [′TACAGTGGTCATTACACTTAAGAACRTGGC |
| | (p.Met110Val) | | | TTCCCATCCTGTCAGTCTTCA′] |
| 3668 | NM_000132.3(F8): c.398A > G | 2157 | F8 | [′TTTCTTCCTGCTATAGGAGCTGAATRTGAT |
| | (p.Tyr133Cys) | | | GATCAGACCAGTCAAAGGGAG′] |
| 3669 | NM_000132.3(F8): c.404A > G | 2157 | F8 | [′CCTGCTATAGGAGCTGAATATGATGRTCA |
| | (p.Asp135Gly) | | | GACCAGTCAAAGGGAGAAAGAA′] |
| 3670 | NM_000132.3(F8): c.940A > G | 2157 | F8 | [′GGAAATCTCGCCAATAACTTTCCTTRCTGC |
| | (p.Thr314Ala) | | | TCAAACACTCTTGATGGACCT′] |
| 3671 | NM_000132.3(F8): c.1226A > G | 2157 | F8 | [′TGGGTACATTACATTGCTGCTGAAGRGGA |
| | (p.Glu409Gly) | | | GGACTGGGACTATGCTCCCTTA′] |
| 3672 | NM_000132.3(F8): c.1331A > G | 2157 | F8 | [′CAGCGGATTGGTAGGAAGTACAAAARAGT |
| | (p.Lys444Arg) | | | CCGATTTATGGCATACACAGAT′] |
| 3673 | NM_000132.3(F8): c.1418A > G | 2157 | F8 | [′TCAGGAATCTTGGGACCTTTACTTTRTGGG |
| | (p.Tyr473Cys) | | | GAAGTTGGAGACACACTGTTG′] |
| 3674 | NM_000132.3(F8): c.1660A > G | 2157 | F8 | [′TCGGTGCCTGACCCGCTATTACTCTRGTTT |
| | (p.Ser554Gly) | | | CGTTAATATGGAGAGAGATCT′] |
| 3675 | NM_000132.3(F8): c.1682A > G | 2157 | F8 | [′TCTAGTTTCGTTAATATGGAGAGAGRTCTA |
| | (p.Asp561Gly) | | | GCTTCAGGACTCATTGGCCCT′] |
| 3676 | NM_000132.3(F8): c.1892A > G | 2157 | F8 | [′GAGGATCCAGAGTTCCAAGCCTCCARCAT |
| | (p.Asn631Ser) | | | CATGCACAGTGAGTAAAGCAGC′] |
| 3677 | NM_000132.3(F8): c.5600A > G | 2157 | F8 | [′TTCCCTCCCTAGGAAAAAGATGTGCRCTCA |
| | (p.His1867Arg) | | | GGCCTGATTGGACCCCTTCTG′] |
| 3678 | NM_000132.3(F8): c.5822A > G | 2157 | F8 | [′TCTCTGTGTCCTTCTCCAGCAATCARTGGC |
| | (p.Asn1941Ser) | | | TACATAATGGATACACTACCT′] |
| 3679 | NM_000132.3(F8): c.6113A > G | 2157 | F8 | [′AGCACACTTTTTCTGGTGTACAGCARTAGT |
| | (p.Asn2038Ser) | | | GAGTAGCAATGTGGGCAGAGG′] |
| 3680 | NM_000132.3(F8): c.6278A > G | 2157 | F8 | [′AAGTGTTATTTTAATTGGTAGGTGGRTCTG |
| | (p.Asp2093Gly) | | | TTGGCACCAATGATTATTCAC′] |
| 3681 | NM_000132.3(F8): c.6371A > G | 2157 | F8 | [′TACATCTCTCAGTTTATCATCATGTRTAGT |
| | | | | CTTGATGGGAAGAAGTGGCAG′] |
| 3682 | NM_000132.3(F8): c.6794A > G | 2157 | F8 | [′ATGAAAGTCACAGGAGTAACTACTCRGGG |
| | (p.Gln2265Arg) | | | AGTAAAATCTCTGCTTACCAGC′] |
| 3683 | NM_000132.3(F8): c.104A > G | 2157 | F8 | [′GGTGCAGTGGAACTGTCATGGGACTRTAT |
| | (p.Tyr35Cys) | | | GCAAAGTGATCTCGGTGAGCTG′] |
| 3684 | NM_000402.4(G6PD): c.466A > G | 2539 | G6PD | [′CAACTCCTATGTGGCTGGCCAGTACRATGA |
| | (p.Asn156Asp) | | | TGCAGCCTCCTACCAGCGCCT′] |
| 3685 | NM_000402.4(G6PD): c.583A > G | 2539 | G6PD | [′GCTCCGGGCTCCCAGCAGAGGCTGGRACC |
| | (p.Asn195Asp) | | | GCATCATCGTGGAGAAGCCCTT′] |
| 3686 | NM_002049.3(GATA1): c.653A > G | 2623 | GATA1 | [′ACAGCCACTCCACTGTGGCGGAGGGRCAG |
| | (p.Asp218Gly) | | | GACAGGCCACTACCTATGCAAC′] |
| 3687 | NM_001097642.2(GJB1): c.194A > | 2705 | GJB1 | [′CAGCCTGGCTGCAACAGCGTTTGCTRTGAC |
| | G (p.Tyr65Cys) | | | CAATTCTTCCCCATCTCCCAT′] |
| 3688 | NM_000166.5(GJB1): c.614A > G | 2705 | GJB1 | [′GCCTCTGGCATCTGCATCATCCTCARTGTG |
| | (p.Asn205Ser) | | | GCCGAGGTGGTGTACCTCATC′] |
| 3689 | NM_000032.4(ALAS2): c.1702A > G | 212 | ALAS2 | [′CCGTCCTGTACACTTTGAGCTCATGRGTGA |
| | (p.Ser568Gly) | | | GTGGGAACGTTCCTACTTCGG′] |
| 3690 | NM_000202.6(IDS): c.404A > G | 3423 | IDS | [′GGCTATGTGACCATGTCGGTGGGAARAGT |
| | (p.Lys135Arg) | | | CTTTCACCCTGGTACTGCTCCA′] |
| 3691 | NM_000292.2(PHKA2): c.896A > G | 5256 | PHKA2 | [′TATGGATGCTGTCGCTTCCTTCGAGRTGGT |
| | (p.Asp299Gly) | | | TATAAAACTCCAAGAGAGGTT′] |
| 3692 | NM_000292.2(PHKA2): c.565A > G | 5256 | PHKA2 | [′TTATGGAATGTGGGAGCGTGGAGATRAGA |
| | (p.Lys189Glu) | | | CTAATCAGGGCATCCCGGAATT′] |
| 3693 | NM_000351.4(STS): c.1331A > G | 412 | STS | [′CGCTCCGATCATGAGTTTCTCTTCCRTTAC |
| | (p.His444Arg) | | | TGCAACGCCTACTTAAATGCT′] |
| 3694 | NM_000133.3(F9): c.278A > G | 2158 | F9 | [′TTCAATTTCTTAACCTATCTCAAAGRTGGA |
| | (p.Asp93Gly) | | | GATCAGTGTGAGTCCAATCCA′] |
| 3695 | NM_000133.3(F9): c.329A > G | 2158 | F9 | [′TGTTTAAATGGCGGCAGTTGCAAGGRTGA |
| | (p.Asp110Gly) | | | CATTAATTCCTATGAATGTTGG′] |
| 3696 | NM_000133.3(F9): c.917A > G | 2158 | F9 | [′CGAATTATTCCTCACCACAACTACARTGCA |
| | (p.Asn306Ser) | | | GCTATTAATAAGTACAACCAT′] |
| 3697 | NM_000133.3(F9): c.1180A > G | 2158 | F9 | [′TACAAAGTTCACCATCTATAACAACRTGTT |
| | (p.Met394Val) | | | CTGTGCTGGCTTCCATGAAGG′] |
| 3698 | NM_000133.3(F9): c.1231A > G | 2158 | F9 | [′AGGTAGAGATTCATGTCAAGGAGATRGTG |
| | (p.Ser411Gly) | | | GGGGACCCCATGTTACTGAAGT′] |
| 3699 | NM_000266.3(NDP): c.131A > G | 4693 | NDP | [′CCTCGACGCTGCATGAGGCACCACTRTGTG |
| | (p.Tyr44Cys) | | | GATTCTATCAGTCACCCATTG′] |
| 3700 | NM_000266.3(NDP): c.1A > G | 4693 | NDP | [′TCTAGAGAAGTTTTTCCTTACAACARTGAG |
| | (p.Met1Val) | | | AAAACATGTACTAGCTGCATC′] |
| 3701 | NM_000266.3(NDP): c.125A > G | 4693 | NDP | [′TCGGACCCTCGACGCTGCATGAGGCRCCA |
| | (p.His42Arg) | | | CTATGTGGATTCTATCAGTCAC′] |
| 3702 | NM_000169.2(GLA): c.886A > G | −1 | — | [′GGCTATCATGGCTGCTCCTTTATTCRTGTC |
| | (p.Met296Val) | | | TAATGACCTCCGACACATCAG′] |
| 3703 | NM_000169.2(GLA): c.101A > G | −1 | — | [′ATCCCTGGGGCTAGAGCACTGGACARTGG |
| | (p.Asn34Ser) | | | ATTGGCAAGGACGCCTACCATG′] |
| 3704 | NM_000169.2(GLA): c.644A > G | −1 | — | [′GAGTCATATCTGTTTTCACAGCCCARTTAT |
| | (p.Asn215Ser) | | | ACAGAAATCCGACAGTACTGC′] |
| 3705 | NM_000169.2(GLA): c.1228A > G | −1 | — | [′AAGGTTAAGAAGTCACATAAATCCCRCAG |
| | (p.Thr410Ala) | | | GCACTGTTTTGCTTCAGCTAGA′] |
| 3706 | NM_000169.2(GLA): c.815A > G | −1 | — | [′TCTTTTTCTCAGTTAGTGATTGGCARCTTTG |
| | (p.Asn272Ser) | | | GCCTCAGCTGGAATCAGCAA′] |
| 3707 | NM_153252.4(BRWD3): c.4786A > | 254065 | BRWD3 | [′AGAAGATAAAGAGAAAAAAGAAACARAA |
| | G (p.Lys1596Glu) | | | GAGAAATCTCATTTATCCACCTC′] |
| 3708 | NM_004463.2(FGD1): c.1396A > G | 2245 | FGD1 | [′GCAGAAACTGGCCCCCTTCCTCAAGRTGTA |
| | (p.Met466Val) | | | TGGTGAGTATGTGAAGAACTT′] |
| 3709 | NM_000054.4(AVPR2): c.614A > G | 554 | AVPR2 | [′GCGGAGCCCTGGGGCCGTCGCACCTRTGT |
| | (p.Tyr205Cys) | | | CACCTGGATTGCCCTGATGGTG′] |
| 3710 | NM_000054.4(AVPR2): c.839A > G | 554 | AVPR2 | [′ATGACGCTAGTGATTGTGGTCGTCTRTGTG |
| | (p.Tyr280Cys) | | | CTGTGCTGGGCACCCTTCTTC′] |
| 3711 | NM_000276.3(OCRL): c.1436A > G | 4952 | OCRL | [′ATCAAGTTCATCCCCACTTATAAGTRTGAC |
| | (p.Tyr479Cys) | | | TCTAAAACAGACCGGTGGGAT] |
| 3712 | NM_000397.3(CYBB): c.302A > G | 1536 | CYBB | [′CAACTGGACAGGAATCTCACCTTTCRTAAA |
| | (p.His101Arg) | | | ATGGTGGCATGGATGATTGCA′] |
| 3713 | NM_000397.3(CYBB): c.1499A > G | 1536 | CYBB | [′GCTGTGCACCATGATGAGGAGAAAGRTGT |
| | (p.Asp500Gly) | | | GATCACAGGCCTGAAACAAAAG′] |
| 3714 | NM_001205019.1(GK): c.880A > G | 2710 | GK | [′TGGAACAGGATGTTTCTTACTATGTRATAC |
| | (p.Asn294Asp) | | | AGGCCATAAGGTTGGTTTTTT′] |
| 3715 | NM_005710.2(PQBP1): c.194A > G | 10084 | PQBP1 | [′CGGCCCCACAGCGGGCTCCCTTACTRCTGG |
| | (p.Tyr65Cys) | | | AATGCAGACACAGACCTTGTA′] |
| 3716 | NM_198270.3(NHS): c.853 − 2A > G | 4810 | NHS | [′CTGAACCTGATTGTACTTTGTTTGCRGTCC |
| | | | | CATCCCCCAGAGGATGAAGAT′] |
| 3717 | NM_000252.2(MTM1): c.566A > G | 4534 | MTM1 | [′CACCATTGGAGAATAACTTTTATTARTAAG |
| | (p.Asn189Ser) | | | TGCTATGAGCTCTGTGACACT′] |
| 3718 | NM_000252.2(MTM1): c.1190A > G | 4534 | MTM1 | [′GCCATGCTGATGTTGGATAGCTTCTRTAGG |
| | (p.Tyr397Cys) | | | AGCATTGAAGGGTTCGAAATA′] |
| 3719 | NM_000252.2(MTM1): c.1261 − | 4534 | MTM1 | [′TAATTAAAACAAATTATCTTCATCARTTTA |
| | 10A > G | | | TTCAGCGAATAGGTCATGGTG′] |
| 3720 | NM_001015877.1(PHF6): c.700A > | 84295 | PHF6 | [′AGGAAAACTGCATATATTTAATGCCRAGA |
| | G (p.Lys234Glu) | | | AGGCAGCTGCCCATTATAAGTG′] |
| 3721 | NM_001015877.1(PHF6): c.686A > | 84295 | PHF6 | [′GAAAATGAAGCACGAGGAAAACTGCRTAT |
| | G (p.His229Arg) | | | ATTTAATGCCAAGAAGGCAGCT′] |
| 3722 | NM_001015877.1(PHF6): c.769A > | 84295 | PHF6 | [′CACAGTCCAGCTCACAACAACATCARGAG |
| | G (p.Arg257Gly) | | | CAGAATTTGGAGACTTTGATAT′] |
| 3723 | NM_000117.2(EMD): c.1A > G | 2010 | EMD | [′GCCTCCGCCTGAGCCCGCACCCGCCRTGG |
| | (p.Met1Val) | | | ACAACTACGCAGATCTTTCGGA′] |
| 3724 | NM_004006.2(DMD): c.2317A > G | 1756 | DMD | [′GGCCATAGAGCGAGAAAAAGCTGAGRAGT |
| | (p.Lys773Glu) | | | TCAGAAAACTGCAAGATGCCAG′] |
| 3725 | NM_004006.2(DMD): c.8734A > G | 1756 | DMD | [′TCTACGAAAGCAGGCTGAGGAGGTCRATA |
| | (p.Asn2912Asp) | | | CTGAGTGGGAAAAATTGAACCT′] |
| 3726 | NM_004006.2(DMD): c.8762A > G | 1756 | DMD | [′ACTGAGTGGGAAAAATTGAACCTGCRCTC |
| | (p.His2921Arg) | | | CGCTGACTGGCAGAGAAAAATA′] |
| 3727 | NM_004006.2(DMD): c.835A > G | 1756 | DMD | [′TCCCCCAAACCCTTCTCTGCAGATCRCGGT |
| | (p.Thr279Ala) | | | CAGTCTAGCACAGGGATATGA′] |
| 3728 | NM_004006.2(DMD): c.9225 − | 1756 | DMD | [′TCGATCGCACTTCAGTTATGATAAAYTGAC |
| | 285A > G | | | CTTGTTATGTGATCAATAATC′] |
| 3729 | NM_000033.3(ABCD1): c.443A > G | 215 | ABCD1 | [′ATCGCCCTCCCTGCTACCTTCGTCARCAGT |
| | (p.Asn148Ser) | | | GCCATCCGTTACCTGGAGGGC′] |
| 3730 | NM_003588.3(CUL4B): c.901 − | 8450 | CUL4B | [′TTTGATTTCTTTTTTTTTCATTGGCRGATCA |
| | 2A > G | | | TGATCAGGAGCATTTTTTTG′] |
| 3731 | NM_000061.2(BTK): c.1288A > G | 695 | BTK | [′GAGAGGCCAGTACGACGTGGCCATCRAGA |
| | (p.Lys430Glu) | | | TGATCAAAGAAGGCTCCATGTC′] |
| 3732 | NM_000061.2(BTK): c.1082A > G | 695 | BTK | [′AGCACCATCCCTGAGCTCATTAACTRCCAT |
| | (p.Tyr361Cys) | | | CAGCACAACTCTGCAGGTGAG′] |
| 3733 | NM_000061.2(BTK): c.919A > G | 695 | BTK | [′GGGGAAAGAAGGAGGTTTCATTGTCRGAG |
| | (p.Arg307Gly) | | | ACTCCAGCAAAGCTGGCAAATA′] |
| 3734 | NM_000061.2(BTK): c.1766A > G | 695 | BTK | [′CACCTTCTAGGGGTTTTGATGTGGGRAATT |
| | (p.Glu589Gly) | | | TACTCCCTGGGGAAGATGCCA′] |
| 3735 | NM_003413.3(ZIC3): c.1213A > G | 7547 | ZIC3 | [′CTACACGCACCCGAGCTCCCTGCGCRAAC |
| | (p.Lys405Glu) | | | ACATGAAGGTAATTACCTCTTT′] |
| 3736 | NM_001037811.2(HSD17B10): c.71 | 3028 | HSD17B10 | [′GCCATCATCGAGAACCCATTCCTCARTGGA |
| | 3A > G (p.Asn238Ser) | | | GAGGTCATCCGGCTGGATGGG′] |
| 3737 | NM_003639.4(IKBKG): c.1219A > G | 8517 | IKBKG | [′CAAGTGCCAGTATCAGGCCCCTGATRTGG |
| | (p.Met407Val) | | | ACACCCTGCAGATACATGTCAT′] |
| 3738 | NM_003639.4(IKBKG): c.1259A > G | 8517 | IKBKG | [′ATACATGTCATGGAGTGCATTGAGTRGGG |
| | (p.Ter420Trp) | | | CCGGCCAGTGCAAGGCCACTGC′] |
| 3739 | NM_005448.2(BMP15): c.704A > G | 9210 | BMP15 | [′TTGGACATTGCCTTCTTGTTACTCTRTTTCA |
| | (p.Tyr235Cys) | | | ATGATACTCATAAAAGCATT′] |
| 3740 | NM_005120.2(MED12): c.3020A > | 9968 | MED12 | [′AAGGTGAAGAACACCATCTACTGCARCGT |
| | G (p.Asn1007Ser) | | | GGAGCCATCGGAATCAAATATG′] |
| 3741 | NM_003688.3(CASK): c.2129A > G | 8573 | CASK | [′GGCAAGAAAAAGAAGCAGTACAAAGRTA |
| | (p.Asp710Gly) | | | AATATTTGGCAAAGCACAATGCA′] |
| 3742 | NM_001363.4(DKC1): c.361A > G | 1736 | DKC1 | [′ACTTCGGGTGGAGAAGACAGGGCACRGTG |
| | (p.Ser121Gly) | | | GTACTCTGGATCCCAAGGTGAC′] |
| 3743 | NM_001363.4(DKC1): c.1069A > G | 1736 | DKC1 | [′ATTAATGACCACAGCGGTCATCTCTRCCTG |
| | (p.Thr357Ala) | | | CGACCATGGTATAGTAGCCAA′] |
| 3744 | NM_000307.4(POU3F4): c.1000A > | 5456 | POU3F4 | [′GTTCTGTAATCGAAGACAAAAAGAGRAAA |
| | G (p.Lys334Glu) | | | GAATGACTCCGCCAGGGGATCA′] |
| 3745 | NM_004429.4(EFNB1): c.472A > G | 1947 | EFNB1 | [′GGGCGGTGTGTGCCGCACACGCACCRTGA |
| | (p.Met158Val) | | | AGATCATCATGAAGGTTGGGCA′] |
| 3746 | NM_000489.4(ATRX): c.4826A > G | 546 | ATRX | [′TTCTTATAGGTGGTAAGTTTTCTTCRTACA |
| | (p.His1609Arg) | | | GTTCTTTTGTGTGACAAACTG′] |
| 3747 | NM_000489.4(ATRX): c.5579A > G | 546 | ATRX | [′TTCTTTTGATCAGGTGTGGGCAATAVTAGT |
| | (p.Asn1860Ser) | | | GAAGGTGGAAGAGGAAAGGCA′] |
| 3748 | NM_000489.4(ATRX): c.6488A > G | 546 | ATRX | [′GGACAAACTAAGCCTGTTTATGTATRTAGG |
| | (p.Tyr2163Cys) | | | TTCTTAGCTCAGGTAGGTTTA] |
| 3749 | NM_000489.4(ATRX): c.6811A > G | 546 | ATRX | [′AGAAGAAGAGTTGACTGAAGAAGAARGA |
| | (p.Arg2271Gly) | | | AAAGCAGCTTGGGCTGAGTATGA′] |
| 3750 | NM_000052.6(ATP7A): c.3911A > G | 538 | ATP7A | [′GTAGCAATGGTGGGAGATGGAATCARTGA |
| | (p.Asn1304Ser) | | | CTCCCCAGCTCTGGCAATGGCT′] |
| 3751 | NM_004992.3(MECP2): c.410A > G | 4204 | MECP2 | [′GGAAAAGCCTTTCGCTCTAAAGTGGRGTT |
| | (p.Glu137Gly) | | | GATTGCGTACTTCGAAAAGGTA′] |
| 3752 | NM_000137.2(FAH): c.1141A > G | 2184 | FAH | [′CATAGACCTGGGGAATGGTCAGACCRGGA |
| | (p.Arg381Gly) | | | AGTTTCTGCTGGACGGGGATGA′] |
| 3753 | NM_000137.2(FAH): c.836A > G | 2184 | FAH | [′CCCTTTGCTGTGCCCAACCCGAAGCRGGTA |
| | (p.Gln279Arg) | | | AGCACATTCTCTGCAGGAAGC′] |
| 3754 | NM_002769.4(PRSS1): c.68A > G | −1 | — | [′GCTGCCCCCTTTGATGATGATGACARGATC |
| | (p.Lys23Arg) | | | GTTGGGGGCTACAACTGTGAG′] |
| 3755 | NM_002769.4(PRSS1): c.161A > G | −1 | — | [′CACTTCTGTGGTGGCTCCCTCATCARCGAA |
| | (p.Asn54Ser) | | | CAGTGGGTGGTATCAGCAGGC′] |
| 3756 | NM_000373.3(UMPS): c.286A > G | 7372 | UMPS | [′AACCAATCAAATTCCAATGCTTATTRGAAG |
| | (p.Arg96Gly) | | | GAAAGAAACAAAGGATTATGG′] |
| 3757 | NM_001918.3(DBT): c.1355A > G | 1629 | DBT | [′ATGAATGTGAGCTGGTCAGCTGATCRCAG |
| | (p.His452Arg) | | | AGTTATTGATGGTGCTACAATG′] |
| 3758 | NM_000108.4(DLD): c.214A > G | 1738 | DLD | [′TTGGTTGTAGACAGTCTGCATTGAGRAAA |
| | (p.Lys72Glu) | | | ATGAAACACTTGGTGGAACATG′] |
| 3759 | NM_000108.4(DLD): c.1483A > G | 1738 | DLD | [′CTTGCAGACCTTATCAGAAGCTTTTRGAGA |
| | (p.Arg495Gly) | | | AGCAAATCTTGCTGCGTCATT′] |
| 3760 | NM_000108.4(DLD): c.1081A > G | 1738 | DLD | [′CATTGGTGATGTAGTTGCTGGTCCARTGCT |
| | (p.Met361Val) | | | GGCTCACAAAGCAGAGGATGA′] |
| 3761 | NM_000481.3(AMT): c.125A > G | 275 | AMT | [′CGCAGGACACCGCTCTATGACTTCCRCCTG |
| | (p.His42Arg) | | | GCCCACGGCGGGAAAATGGTG′] |
| 3762 | NM_000151.3(G6PC): c.230 + 4A > G | 2538 | G6PC | [′GGCTCAACCTCGTCTTTAAGTGGTARGAAC |
| | | | | CATATAGAGAGGAGATCAGCA′] |
| 3763 | NM_000532.4(PCCB): c.1304A > G | 5096 | PCCB | [′CAGCATTTGGATCTGTTTTAGGCCTRTGGA |
| | (p.Tyr435Cys) | | | GGTGCCTATGATGTCATGAGC′] |
| 3764 | NM_000387.5(SLC25A20): c.713A > | 788 | SLC25A20 | [′CCAGATGTGCTCAAGTCTCGATTCCRGACT |
| | G (p.Gln238Arg) | | | GGTGAGTGGAAGGTAGTGGGG′] |
| 3765 | NM_004360.3(CDH1): c.2512A > G | 999 | CDH1 | [′TCTGCTCGTGTTTGACTATGAAGGARGCGG |
| | (p.Ser838Gly) | | | TTCCGAAGCTGCTAGTCTGAG′] |
| 3766 | NM_004360.3(CDH1): c.1018A > G | 999 | CDH1 | [′GTCGATCTCTCTGCAGAGTTTCCCTDCGTA |
| | (p.Thr340Ala) | | | TACCCTGGTGGTTCAAGCTGC′] |
| 3767 | NM_003361.3(UMOD): c.383A > G | 7369 | UMOD | [′TGCCACGCCCTGGCCACATGTGTCARTGTG |
| | (p.Asn128Ser) | | | GTGGGCAGCTACTTGTGCGTA′] |
| 3768 | NM_000463.2(UGT1A1): c.992A > | −1 | — | [′GCTGATGCTTTGGGCAAAATCCCTCRGACA |
| | G (p.Gln331Arg) | | | GTAAGAAGATTCTATACCATG′] |
| 3769 | NM_000463.2(UGT1A1): c.1085 − | −1 | — | [′TGACATCCTCCCTATTTTGCATCTCRGGTC |
| | 2A > G | | | ACCCGATGACCCGTGCCTTTA′] |
| 3770 | NM_000463.2(UGT1A1): c.1070A > | −1 | — | [′ACGATACTTGTTAAGTGGCTACCCCRAAAC |
| | G (p.Gln357Arg) | | | GATCTGCTTGGTATGTTGGGC′] |
| 3771 | NM_000463.2(UGT1A1): c.1198A > | −1 | — | [′GCCCTTGTTTGGTGATCAGATGGACVATGC |
| | G (p.Asn400Asp) | | | AAAGCGCATGGAGACTAAGGG′] |
| 3772 | NM_001382.3(DPAGT1): c.509A > | 1798 | DPAGT1 | [′TCTCTCCCCGCAGGAATCCTGTACTRTGTC |
| | G (p.Tyr170Cys) | | | TACATGGGGCTGCTGGCAGTG′] |
| 3773 | NM_001007792.1(NTRK1): c.986A > | 4914 | NTRK1 | [′CCCACCCACGTCAACAACGGCAACTRCAC |
| | G (p.Tyr329Cys) | | | GCTGCTGGCTGCCAACCCCTTC′] |
| 3774 | NM_001007792.1(NTRK1): c.1651A > | 4914 | NTRK1 | [′CTGCACCGAGGGCCGCCCCCTGCTCRTGGT |
| | G (p.Met551Val) | | | CTTTGAGTATATGCGGCACGG′] |
| 3775 | NM_000363.4(TNNI3): c.569A > G | 7137 | TNNI3 | [′CTCCAGGAAAACCGGGAGGTGGGAGRCTG |
| | (p.Asp190Gly) | | | GCGCAAGAACATCGATGCACTG′] |
| 3776 | NM_000363.4(TNNI3): c.532A > G | 7137 | TNNI3 | [′GCGGGCCCACCTCAAGCAGGTGAAGRAGG |
| | (p.Lys178Glu) | | | AGGACACCGAGAAGGTGAGTGT′] |
| 3777 | NM_001018005.1(TPM1): c.539A > | 7168 | TPM1 | [′ATTGAGAGCGACCTGGAACGTGCAGDGGA |
| | G (p.Glu180Gly) | | | GCGGGCTGAGCTCTCAGAAGGG′] |
| 3778 | NM_001159287.1(TPI1): c.622A > G | 7167 | TPI1 | [′CCTGGCCTATGAGCCTGTGTGGGCCRTTGG |
| | (p.Ile208Val) | | | TACTGGCAAGACTGCAACACC′] |
| 3779 | NM_000359.2(TGM1): c.1469A > G | 7051 | TGM1 | [′AATGGCCTGGTCTACATGAAGTACGRCAC |
| | (p.Asp490Gly) | | | GCCTTTCATTTTTGCTGAGGTG′] |
| 3780 | NM_001024847.2(TGFBR2): c.1472 − | 7048 | TGFBR2 | [′CCCTGTGTTTGCTGGCTTTCTTCACRGAAG |
| | 2A > G | | | TAAAAGATTATGAGCCTCCAT′] |
| 3781 | NM_003242.5(TGFBR2): c.1273A > | 7048 | TGFBR2 | [′GCTATAGGTGGGAACTGCAAGATACRTGG |
| | G (p.Met425Val) | | | CTCCAGAAGTCCTAGAATCCAG′] |
| 3782 | NM_004612.3(TGFBR1): c.1199A > | 7046 | TGFBR1 | [′CATTTTGAATCCTTCAAACGTGCTGRCATC |
| | G (p.Asp400Gly) | | | TATGCAATGGGCTTAGTATTC′] |
| 3783 | NM_001128177.1(THRB): c.1324A > | 7068 | THRB | [′CTGCCATGCCAGCCGCTTCCTGCACRTGAA |
| | G (p.Met442Val) | | | GGTGGAATGCCCCACAGAACT′] |
| 3784 | NM_001128177.1(THRB): c.1327A | 7068 | THRB | [′CCATGCCAGCCGCTTCCTGCACATGRAGGT |
| | > G (p.Lys443Glu) | | | GGAATGCCCCACAGAACTCTT′] |
| 3785 | NM_001128177.1(THRB): c.1009A | 7068 | THRB | [′AACCTTGAATGGGGAAATGGCAGTGRCAC |
| | > G (p.Thr337Ala) | | | GGGGCCAGCTGAAAAATGGGGG′] |
| 3786 | NM_033360.3(KRAS): c.13A > G | 3845 | KRAS | [′AGGCCTGCTGAAAATGACTGAATATRAAC |
| | (p.Lys5Glu) | | | TTGTGGTAGTTGGAGCTGGTGG′] |
| 3787 | NM_005343.2(HRAS): c.350A > G | −1 | — | [′GTGCCCATGGTGCTGGTGGGGAACARGTG |
| | (p.Lys117Arg) | | | TGACCTGGCTGCACGCACTGTG′] |
| 3788 | NM_001063.3(TF): c.956A > G | 7018 | TF | [′GACCTGCTGTTTAAGGACTCTGCCCRCGGG |
| | (p.His319Arg) | | | TTTTTAAAAGTCCCCCCCAGG′] |
| 3789 | NM_001063.3(TF): c.1936A > G | 7018 | TF | [′CTTTTGTTTGTTCCGGTCGGAAACCRAGGA |
| | (p.Lys646Glu) | | | CCTTCTGTTCAGAGATGACAC′] |
| 3790 | NM_212472.2(PRKAR1A): c.891 + 3A > | 5573 | PRKAR1A | [′ATGAGTTCTTCATTATTTTAGAGGTRAAGA |
| | G | | | ACTCAGAATTTAATACTTGAA′] |
| 3791 | NM_212472.2(PRKAR1A): c.1 A > G | 5573 | PRKAR1A | [′GTGTGTTTTTTTCTCGCAGAGAACCRTGGA |
| | (p.Met1Val) | | | GTCTGGCAGTACCGCCGCCAG′] |
| 3792 | NM_000362.4(TIMP3): c.572A > G | −1 | — | [′GCCTGCATCCGGCAGAAGGGCGGCTRCTG |
| | (p.Tyr191Cys) | | | CAGCTGGTACCGAGGATGGGCC′] |
| 3793 | NM_000367.3(TPMT): c.719A > G | 7172 | TPMT | [′GATTACAGGTGTGAGCCACCGCACCNAGC |
| - | (p.Tyr240Cys) | | | CAATTTTGAGTATTTTTAAAAG′, |
| 3795 | | | | ′TAACATGTTACTCTTTCTTGTTTCARGTAAA |
| | | | | ATATGCAATATACRTYGTCT′, |
| | | | | ′AGGTTGATGCTTTTGAAGAACGACAKAAAA |
| | | | | GTTGGGGAATTGACTGTCTTT′] |
| 3796 | NM_198253.2(TERT): c.2315A > G | 7015 | TERT | [′TCTACCTTGACAGACCTCCAGCCGTRCATG |
| | (p.Tyr772Cys) | | | CGACAGTTCGTGGCTCACCTG′] |
| 3797 | NM_000073.2(CD3G): c.1A > G | 917 | CD3G | [′CTTTTGCCGGAGGACAGAGACTGACRTGG |
| | (p.MetlVal) | | | AACAGGGGAAGGGCCTGGCTGT′] |
| 3798 | NM_000899.4(KITLG): c.107A > G | 4254 | KITLG | [′ATCTGCAGGAATCGTGTGACTAATARTGTA |
| | (p.Asn36Ser) | | | AAAGACGTCACTAAATTGGTA′] |
| 3799 | NM_001024858.2(SPTB): c.1A > G | 6710 | SPTB | [′GCGGAGCTGCTAAGAGCCTGCTGACRTGA |
| | (p.MetlVal) | | | CATCGGCCACAGAGTTTGAAAA′] |
| 3800 | NM_003126.2(SPTA1): c.143A > G | 6708 | SPTA1 | [′GAGCGGGTCGCTGAGAGGGGTCAGARGCT |
| | (p.Lys48Arg) | | | TGAGGATTCCTATCACTTACAA′] |
| 3801 | NM_005633.3(SOS1): c.1654A > G | 6654 | SOS1 | [′TTTACAGTACCGGAGTACACTGGAARGGA |
| | (p.Arg552Gly) | | | TGCTTGATGTAACAATGCTACA′] |
| 3802 | NM_003041.3(SLC5A2): c.1961A > | −1 | — | [′GACCCGAGCTGGGCCCGTGTGGTCARCCT |
| | G (p.Asn654Ser) | | | CAATGCCCTGCTCATGATGGCA′] |
| 3803 | NM_000343.3(SLC5A1): c.83A > G | 6523 | SLC5A1 | [′CACGAGCTCATTCGCAATGCAGCCGRTATC |
| | (p.Asp28Gly) | | | TCCATCATCGTTATCTACTTC′] |
| 3804 | NM_000702.3(ATP1A2): c.1033A > | 477 | ATP1A2 | [′TCTCTACCAGGTGTGCCTGACCCTGRCAGC |
| | G (p.Thr345Ala) | | | CAAGCGCATGGCACGGAAGAA′] |
| 3805 | NM_003124.4(SPR): c.448A > G | 6697 | SPR | [′CTTCCCGGACAGTCCTGGCCTCAACRGAAC |
| | (p.Arg150Gly) | | | CGTGGTTAACATCTCGTCCCT′] |
| 3806 | NM_001161766.1(AHCY): c.344A > | 191 | AHCY | [′CTCACCAACCTCATCCACACCAAGTRCCCG |
| | G (p.Tyr115Cys) | | | CAGCTTCTGCCAGGTGAGCAG′] |
| 3807 | NM_001035.2(RYR2): c.12602A > G | 6262 | RYR2 | [′TGCGAGGACACCATCTTTGAAATGCRGCT |
| | (p.Gln4201Arg) | | | GGCGGCTCAGATCTCGGAGTCG′] |
| 3808 | NM_000540.2(RYR1): c.14387A > G | 6261 | RYR1 | [′CAGTCCTTCCTGTACCTGGGCTGGTRTATG |
| | (p.Tyr4796Cys) | | | GTGATGTCCCTCTTGGGACAC′] |
| 3809 | NM_000540.2(RYR1): c.14647 − | 6261 | RYR1 | [′CTCTGTCTCAAAAAAAAAAAAAAACRTAT |
| | 1449A > G | | | GTAAAGTTGTTCCCAAATGCCA′] |
| 3810 | NM_000540.2(RYR1): c.13909A > G | 6261 | RYR1 | [′GGTGTACTACTTCCTGGAGGAAAGCRCAG |
| | (p.Thr4637Ala) | | | GCTACATGGAACCCGCCCTGCG′] |
| 3811 | NM_000539.3(RHO): c.533A > G | 6010 | RHO | [′TCTCCCTACCTGCCTGTCCTCAGGTRCATC |
| | (p.Tyr178Cys) | | | CCCGAGGGCCTGCAGTGCTCG′] |
| 3812 | NM_000539.3(RHO): c.569A > G | 6010 | RHO | [′GGCCTGCAGTGCTCGTGTGGAATCGRCTAC |
| | (p.Asp190Gly) | | | TACACGCTCAAGCCGGAGGTC′] |
| 3813 | NM_000539.3(RHO): c.886A > G | 6010 | RHO | [′CATGACCATCCCAGCGTTCTTTGCCRAGAG |
| | (p.Lys296Glu) | | | CGCCGCCATCTACAACCCTGT′] |
| 3814 | NM_000539.3(RHO): c.44A > G | 6010 | RHO | [′CCTAACTTCTACGTGCCCTTCTCCARTGCG |
| | (p.Asn15Ser) | | | ACGGGTGTGGTACGCAGCCCC′] |
| 3815 | NM_000321.2(RB1): c.2490 − | 5925 | RB1 | [′AAGGGTGCTGTGGATCAGGGAAATGRTGA |
| | 1398A > G | | | GTATGAAGCTGTTTTAAATTCT′] |
| 3816 | NM_000536.3(RAG2): c.115A > G | 5897 | RAG2 | [′CTTTGGACAAAAAGGCTGGCCCAAARGAT |
| | (p.Arg39Gly) | | | CCTGCCCCACTGGAGTTTTCCA′] |
| 3817 | NM_000448.2(RAG1): c.2735A > G | 5896 | RAG1 | [′GAGTGCCCAGAATCCCTCTGCCAGTRCAGT |
| | (p.Tyr912Cys) | | | TTCAATTCACAGCGTTTTGCT] |
| 3818 | NM_000448.2(RAG1): c.1286A > G | 5896 | RAG1 | [′TTTGCTGACAAAGAAGAAGGTGGAGRTGT |
| | (p.Asp429Gly) | | | GAAGTCCGTGTGCATGACCTTG′] |
| 3819 | NM_000925.3(PDHB): c.395A > G | 5162 | PDHB | [′ATAAACTCAGCTGCCAAGACCTACTRCAT |
| | (p.Tyr132Cys) | | | GTCTGGTGGCCTTCAGCCTGTG′] |
| 3820 | NM_000055.2(BCHE): c.293A > G | 590 | BCHE | [′GCAAATTCTTGCTGTCAGAACATAGRTCAA |
| | (p.Asp98Gly) | | | AGTTTTCCAGGCTTCCATGGA′] |
| 3821 | NM_000055.2(BCHE): c.467A > G | 590 | BCHE | [′ACTGGAACATCATCTTTACATGTTTDTGAT |
| | (p.Tyr156Cys) | | | GGCAAGTTTCTGGCTCGGGTT′] |
| 3822 | NM_005360.4(MAF): c.890A > G | 4094 | MAF | [′CTGAAGCAGAAGAGGCGGACCCTGARAAA |
| | (p.Lys297Arg) | | | CCGCGGCTATGCCCAGTCCTGC′] |
| 3823 | NM_002739.3(PRKCG): c.380A > G | 5582 | PRKCG | [′TCCCTCCTCTACGGGCTTGTGCACCRGGGC |
| | (p.Gln127Arg) | | | ATGAAATGCTCCTGTGAGTGA′] |
| 3824 | NM_002739.3(PRKCG): c.1081A > | 5582 | PRKCG | [′CTTCCTCATGGTTCTAGGAAAAGGCRGTTT |
| | G (p.Ser361Gly) | | | TGGGAAGGTTGGATTCCTGGG′] |
| 3825 | NM_000141.4(FGFR2): c.983A > G | 2263 | FGFR2 | [′ACGGACAAAGAGATTGAGGTTCTCTRTATT |
| | (p.Tyr328Cys) | | | CGGAATGTAACTTTTGAGGAC′] |
| 3826 | NM_000141.4(FGFR2): c.1124A > G | 2263 | FGFR2 | [′AAGGAGATTACAGCTTCCCCAGACTRCCT |
| | (p.Tyr375Cys) | | | GGAGATAGCCATTTACTGCATA′] |
| 3827 | NM_000141.4(FGFR2): c.874A > G | 2263 | FGFR2 | [′TGCCCAGCCCCACATCCAGTGGATCRAGC |
| | (p.Lys292Glu) | | | ACGTGGAAAAGAACGGCAGTAA′] |
| 3828 | NM_000141.4(FGFR2): c.1576A > G | 2263 | FGFR2 | [′ACTGTTCATAGATGATGCCACAGAGRAAG |
| | (p.Lys526Glu) | | | ACCTTTCTGATCTGGTGTCAGA′] |
| 3829 | NM_000313.3(PROS1): c.773A > G | 5627 | PROS1 | [′AACATGTGTGCTCAGCTTTGTGTCARTTAC |
| | (p.Asn258Ser) | | | CCTGGAGGTTACACTTGCTAT′] |
| 3830 | NM_000313.3(PROS1): c.586A > G | 5627 | PROS1 | [′AAATGGTTTTGTTATGCTTTCAAATRAGAA |
| | (p.Lys196Glu) | | | AGATTGTAAAGGTAAGAGCAG′] |
| 3831 | NM_002834.3(PTPN11): c.922A > G | 5781 | PTPN11 | [′GCCTGTTTCAGATTACATCAATGCARATAT |
| | (p.Asn308Asp) | | | CATCATGGTAAGCTTTGCTTT′] |
| 3832 | NM_002834.3(PTPN11): c.923A > G | 5781 | PTPN11 | [′CCTGTTTCAGATTACATCAATGCAAVTATC |
| | (p.Asn308Ser) | | | ATCATGGTAAGCTTTGCTTTT′] |
| 3833 | NM_002834.3(PTPN11): c.836A > G | 5781 | PTPN11 | [′CAAGAAAACAAAAACAAAAATAGATVTA |
| | (p.Tyr279Cys) | | | AAAACATCCTGCCCTGTAAGTAT′] |
| 3834 | NM_002834.3(PTPN11): c.182A > G | 5781 | PTPN11 | [′CACATCAAGATTCAGAACACTGGTGNTTA |
| | (p.Asp61Gly) | | | CTATGACCTGTATGGAGGGGAG′] |
| 3835 | NM_002834.3(PTPN11): c.188A > G | 5781 | PTPN11 | [′AAGATTCAGAACACTGGTGATTACTRTGA |
| | (p.Tyr63Cys) | | | CCTGTATGGAGGGGAGAAATTT′] |
| 3836 | NM_002834.3(PTPN11): c.227A > G | 5781 | PTPN11 | [′GGGGAGAAATTTGCCACTTTGGCTGNGTT |
| | (p.Glu76Gly) | | | GGTCCAGTATTACATGGAACAT′] |
| 3837 | NM_002834.3(PTPN11): c.236A > G | 5781 | PTPN11 | [′TTTGCCACTTTGGCTGAGTTGGTCCRGTAT |
| | (p.Gln79Arg) | | | TACATGGAACATCACGGGCAA′] |
| 3838 | NM_002834.3(PTPN11): c.1529A > | 5781 | PTPN11 | [′TCAGGGATGGTCCAGACAGAAGCACVGTA |
| | G (p.Gln510Arg) | | | CCGATTTATCTATATGGCGGTC′] |
| 3839 | NM_002755.3(MAP2K1): c.389A > | 5604 | MAP2K1 | [′AACTCTCCGTACATCGTGGGCTTCTRTGGT |
| | G (p.Tyr130Cys) | | | GCGTTCTACAGCGATGGCGAG′] |
| 3840 | NM_006006.4(ZBTB16): c.1849A > | 7704 | ZBTB16 | [′CCAGCGCTCCCGGGACTACTCGGCCRTGAT |
| | G (p.Met617Val) | | | CAAGCACCTGAGAACGCACAA′] |
| 3841 | NM_000311.3(PRNP): c.385A > G | 5621 | PRNP | [′AGTGGTGGGGGGCCTTGGCGGCTACRTGC |
| | (p.Met129Val) | | | TGGGAAGTGCCATGAGCAGGCC′] |
| 3842 | NM_000311.3(PRNP): c.650A > G | 5621 | PRNP | [′GTGGTTGAGCAGATGTGTATCACCCRGTAC |
| | (p.Gln217Arg) | | | GAGAGGGAATCTCAGGCCTAT′] |
| 3843 | NM_000311.3(PRNP): c.547A > G | 5621 | PRNP | [′CTTTGTGCACGACTGCGTCAATATCRCAAT |
| | (p.Thr183Ala) | | | CAAGCAGCACACGGTCACCAC′] |
| 3844 | NM_000311.3(PRNP): c.560A > G | 5621 | PRNP | [′TGCGTCAATATCACAATCAAGCAGCRCAC |
| | (p.His187Arg) | | | GGTCACCACAACCACCAAGGGG′] |
| 3845 | NM_000371.3(TTR): c.401A > G | 7276 | TTR | [′ACCATTGCCGCCCTGCTGAGCCCCTRCTCC |
| | (p.Tyr134Cys) | | | TATTCCACCACGGCTGTCGTC′] |
| 3846 | NM_000371.3(TTR): c.238A > G | 7276 | TTR | [′GTCTGGAGAGCTGCATGGGCTCACARCTG |
| | (p.Thr80Ala) | | | AGGAGGAATTTGTAGAAGGGAT′] |
| 3847 | NM_000371.3(TTR): c.185A > G | 7276 | TTR | [′AGAAAGGCTGCTGATGACACCTGGGRGCC |
| | (p.Glu62Gly) | | | ATTTGCCTCTGGGTAAGTTGCC′] |
| 3848 | NM_000371.3(TTR): c.205A > G | 7276 | TTR | [′CCAGACTTTCACACCTTATAGGAAARCCA |
| | (p.Thr69Ala) | | | GTGAGTCTGGAGAGCTGCATGG′] |
| 3849 | NM_000371.3(TTR): c.379A > G | 7276 | TTR | [′CGACTCCGGCCCCCGCCGCTACACCRTTGC |
| | (p.Ile127Val) | | | CGCCCTGCTGAGCCCCTACTC′] |
| 3850 | NM_000371.3(TTR): c.113A > G | 7276 | TTR | [′TGTCCTCTGATGGTCAAAGTTCTAGRTGCT |
| | (p.Asp38Gly) | | | GTCCGAGGCAGTCCTGCCATC′] |
| 3851 | NM_000217.2(KCNA1): c.676A > G | 3736 | KCNA1 | [′CACAGACCCCTTCTTCATCGTGGAARCGCT |
| | (p.Thr226Ala) | | | GTGTATCATCTGGTTCTCCTT′] |
| 3852 | NM_000217.2(KCNA1): c.763A > G | 3736 | KCNA1 | [′GACGGACTTCTTCAAAAACATCATGRACTT |
| | (p.Asn255Asp) | | | CATAGACATTGTGGCCATCAT′] |
| 3853 | NM_002693.2(POLG): c.2864A > G | 5428 | POLG | [′AAAATCTTCAACTACGGCCGCATCTRTGGT |
| | (p.Tyr955Cys) | | | GCTGGGCAGCCCTTTGCTGAG′] |
| 3854 | NM_002693.2(POLG): c.2591A > G | 5428 | POLG | [′GAGCCCACATGGCTCACCGCCAGCARTGC |
| | (p.Asn864Ser) | | | CCGGGTATGTGACCTCTGTACC′] |
| 3855 | NM_000174.4(GP9): c.182A > G | 2815 | GP9 | [′ACCCGCCACCTTCTGCTGGCCAACARCAGC |
| | (p.Asn61Ser) | | | CTTCAGTCCGTGCCCCCGGGA′] |
| 3856 | NM_000174.4(GP9): c.110A > G | 2815 | GP9 | [′CTGGAAACCATGGGGCTGTGGGTGGRCTG |
| | (p.Asp37Gly) | | | CAGGGGCCACGGACTCACGGCC′] |
| 3857 | NM_006206.4(PDGFRA): c.1664A > | 5156 | PDGFRA | [′CCTGGTCATTTATAGAAACCGAGGTRTGA |
| | G (p.Tyr555Cys) | | | AATTCGCTGGAGGGTCATTGAA′] |
| 3858 | NM_000301.3(PLG): c.112A > G | 5340 | PLG | [′GGGGGCTTCACTGTTCAGTGTCACTRAGAA |
| | (p.Lys38Glu) | | | GCAGCTGGGAGCAGGAAGTAT′] |
| 3859 | NM_000293.2(PHKB): c.306 − 2A > G | 5257 | PHKB | [′GTTTCATGAGTTATCTCTCTCACCCRGGCG |
| | | | | AATTGATGATGACAAGGGAAG′] |
| 3860 | NM_000175.3(GPI): c.1028A > G | 2821 | GPI | [′ACACACGCCATGCTGCCCTATGACCRGTAC |
| | (p.Gln343Arg) | | | CTGCACCGCTTTGCTGCGTAC′] |
| 3861 | NM_002633.2(PGM1): c.343A > G | 5236 | PGM1 | [′CAAAGCCATTGGTGGGATCATTCTGRCAG |
| | (p.Thr115Ala) | | | CCAGTCACAACCCAGGGGGCCC′] |
| 3862 | NM_006218.2(PIK3CA): c.3140A > | 5290 | PIK3CA | [′TTCATGAAACAAATGAATGATGCACDTCA |
| | G (p.His1047Arg) | | | TGGTGGCTGGACAACAAAAATG′] |
| 3863 | NM_006218.2(PIK3CA): c.1634A > | 5290 | PIK3CA | [′CGAGATCCTCTCTCTGAAATCACTGVGCAG |
| | G (p.Glu545Gly) | | | GAGAAAGATTTTCTATGGAGT′] |
| 3864 | NM_000478.4(ALPL): c.1250A > G | 249 | ALPL | [′CCCTTCACTGCCATCCTGTATGGCARTGGG |
| | (p.Asn417Ser) | | | CCTGGCTACAAGGTGGTGGGC′] |
| 3865 | NM_018849.2(ABCB4): c.523A > G | 5244 | ABCB4 | [′AGAAATAAACAGGTATAAGATGTGARTTC |
| - | (p.Thr175Ala) | | | AGTCCTCAAATAAACCTACTAT′, |
| 3867 | | | | ′TTCTATATGAAAGTGTGACATTAACRATGT |
| | | | | ACCTACTCTGTTAGCCGCGYA′, |
| | | | | ′TTTCCTGTCGTAGAATAGCATGAAARAACT |
| | | | | TCTGCCTAATTTTCCTGATCT′] |
| 3868 | NM_001083116.1(PRF1): c.755A > | 5551 | PRF1 | [′CTGGCCCTGGAAGGGCTCACGGACARCGA |
| | G (p.Asn252Ser) | | | GGTGGAGGACTGCCTGACTGTC′] |
| 3869 | NM_198965.1(PTHLH): c.534A > G | 5744 | PTHLH | [′TTCCTTCTTTTTGCAGGAGGCATTGRAATT |
| | (p.Ter178T1p) | | | TTCAGCAGAGACCTTCCAAGG′] |
| 3870 | NM_000316.2(PTH1R): c.668A > G | 5745 | PTH1R | [′CTGCACTGCACGCGCAACTACATCCRCATG |
| | (p.His223Arg) | | | CACCTGTTCCTGTCCTTCATG′] |
| 3871 | NM_003122.4(SPINK1): c.101A > G | 6690 | SPINK1 | [′TTCCATTTTTAGGCCAAATGTTACARTGAA |
| | (p.Asn34Ser) | | | CTTAATGGATGCACCAAGATA′] |
| 3872 | NM_006194.3(PAX9): c.271A > G | 5083 | PAX9 | [′CGTGGTGAAACACATCCGGACCTACRAGC |
| | (p.Lys91Glu) | | | AGAGAGACCCCGGCATCTTCGC′] |
| 3873 | NM_013953.3(PAX8): c.160A > G | −1 | — | [′CGACATCTCTCGCCAGCTCCGCGTCRGCCA |
| | (p.Ser54Gly) | | | TGGCTGCGTCAGCAAGATCCT′] |
| 3874 | NM_005188.3(CBL): c.1144A > G | 867 | CBL | [′GATGGGCTCCACATTCCAACTATGTRAAAT |
| | (p.Lys382Glu) | | | ATGTGCTGAAAATGATAAGGA′] |
| 3875 | NM_000222.2(KIT): c.2459A > G | 3815 | KIT | [′GGTCTAGCCAGAGACATCAAGAATGRTTC |
| | (p.Asp820Gly) | | | TAATTATGTGGTTAAAGGAAAC′] |
| 3876 | NM_000222.2(KIT): c.2386A > G | 3815 | KIT | [′GTGTATTCACAGAGACTTGGCAGCCRGAA |
| | (p.Arg796Gly) | | | ATATCCTCCTTACTCATGGTCG′] |
| 3877 | NM_000222.2(KIT): c.1924A > G | 3815 | KIT | [′ACGGGAAGCCCTCATGTCTGAACTCRAAG |
| | (p.Lys642Glu) | | | TCCTGAGTTACCTTGGTAATCA′] |
| 3878 | NM_001005862.2(ERBB2): c.2480A > | 2064 | ERBB2 | [′CGGAACGTGCTGGTCAAGAGTCCCARCCA |
| | G (p.Asn827Ser) | | | TGTCAAAATTACAGACTTCGGG′] |
| 3879 | NM_001127500.1(MET): c.3743A > | 4233 | MET | [′GATTTTGGTCTTGCCAGAGACATGTRTGAT |
| | G (p.Tyr1248Cys) | | | AAAGAATACTATAGTGTACAC′] |
| 3880 | NM_001127500.1(MET): c.3335A > | 4233 | MET | [′ACAGGGCATTTTGGTTGTGTATATCVTGGG |
| | G (p.His1112Arg) | | | ACTTTGTTGGACAATGATGGC′] |
| 3881 | NM_001127500.1(MET): c.3785A > | 4233 | MET | [′AGTGTACACAACAAAACAGGTGCAARGCT |
| | G (p.Lys1262Arg) | | | GCCAGTGAAGTGGATGGCTTTG′] |
| 3882 | NM_002524.4(NRAS): c.182A > G | 4893 | NRAS | [′TTGGACATACTGGATACAGCTGGACNAGA |
| | (p.Gln6lArg) | | | AGAGTACAGTGCCATGAGAGAC′] |
| 3883 | NM_004333.4(BRAF): c.1801A > G | 673 | BRAF | [′AGGTGATTTTGGTCTAGCTACAGTGVAATC |
| | (p.Lys601Glu) | | | TCGATGGAGTGGGTCCCATCA′] |
| 3884 | NM_004333.4(BRAF): c.1781A > G | 673 | BRAF | [′GAAGACCTCACAGTAAAAATAGGTGDTTT |
| | (p.Asp594Gly) | | | TGGTCTAGCTACAGTGAAATCT′] |
| 3885 | NM_004333.4(BRAF): c.770A > G | 673 | BRAF | [′GACTTTTGTCGAAAGCTGCTTTTCCRGGGT |
| | (p.Gln257Arg) | | | TTCCGCTGTCAAACATGTGGT′] |
| 3886 | NM_004333.4(BRAF): c.1495A > G | 673 | BRAF | [′TACACCTCAGCAGTTACAAGCCTTCRAAA |
| | (p.Lys499Glu) | | | ATGAAGTAGGAGTACTCAGGTG′] |
| 3887 | NM_004333.4(BRAF): c.1502A > G | 673 | BRAF | [′CAGCAGTTACAAGCCTTCAAAAATGNAGT |
| | (p.Glu501Gly) | | | AGGAGTACTCAGGTGAGCTTGT′] |
| 3888 | NM_004333.4(BRAF): c.1741A > G | 673 | BRAF | [′CATCCACAGAGACCTCAAGAGTAATVGTA |
| | (p.Asn581Asp) | | | TCCTTCCTGAAATTTGTCTGCG′] |
| 3889 | NM_000270.3(PNP): c.383A > G | 4860 | PNP | [′CTGAACCCCAAGTTTGAGGTTGGAGRTATC |
| | (p.Asp128Gly) | | | ATGCTGATCCGTGACCATATC′] |
| 3890 | NM_000270.3(PNP): c.575A > G | 4860 | PNP | [′CAACGTGAGCTACAGGAAGGCACCTRTGT |
| | (p.Tyr192Cys) | | | GATGGTGGCAGGCCCCAGCTTT′] |
| 3891 | NM_000258.2(MYL3): c.445A > G | 4634 | MYL3 | [′CGACAAGGAGGGCAATGGCACTGTCRTGG |
| | (p.Met149Val) | | | GTGCTGAGCTTCGCCACGTGCT′] |
| 3892 | NM_000257.3(MYH7): c.2333A > G | 4625 | MYH7 | [′CTGGGGCTGCTGGAGGAAATGAGGGRCGA |
| | (p.Asp778Gly) | | | GAGGCTGAGCCGCATCATCACG′] |
| 3893 | NM_000257.3(MYH7): c.2717A > G | 4625 | MYH7 | [′CTGGCAGATGCTGAGGAGCGCTGTGRTCA |
| | (p.Asp906Gly) | | | GCTGATCAAAAACAAGATTCAG′] |
| 3894 | NM_002470.3(MYH3): c.1385A > G | 4621 | MYH3 | [′AGACAACACTTCATTGGTGTTTTGGRCATT |
| | (p.Asp462Gly) | | | GCAGGCTTTGAAATCTTTGAG′] |
| 3895 | NM_000530.6(MPZ): c.286A > G | 4359 | MPZ | [′CTACATTGACGAGGTGGGGACCTTCRAAG |
| | (p.Lys96Glu) | | | AGCGCATCCAGTGGGTAGGGGA′] |
| 3896 | NM_000530.6(MPZ): c.242A > G | 4359 | MPZ | [′TCCCCTCATTCCTCATAGATCTTCCRCTAT |
| | (p.His81Arg) | | | GCCAAGGGACAACCCTACATT′] |
| 3897 | NG_012123.1: g.2493A > G | 6347 | CCL2 | [′GAAAAGAAAGTCTTCTGGAAAGTGAYAGC |
| | | | | TGTCTGCCTCCCACTTCTGCTC′] |
| 3898 | RMRP: n.71A > G | 6023 | RMRP | [′TGTTCCTCCCCTTTCCGCCTAGGGGRAAGT |
| | | | | CCCCGGACCTCGGGCAGAGAG′] |
| 3899 | NM_005006.6(NDUFS1): c.755A > | 4719 | NDUFS1 | [′TTTCTCAGAAAGACAGAATCCATTGRTGTA |
| | G (p.Asp252Gly) | | | ATGGATGCGGTTGGAAGTAAT′] |
| 3900 | NM_005912.2(MC4R): c.508A > G | 4160 | MC4R | [′GACAGTTAAGCGGGTTGGGATCATCRTAA |
| | (p.Ile170Val) | | | GTTGTATCTGGGCAGCTTGCAC′] |
| 3901 | NM_005912.2(MC4R): c.821A > G | 4160 | MC4R | [′ATATTCTACATCTCTTGTCCTCAGARTCCA |
| | (p.Asn274Ser) | | | TATTGTGTGTGCTTCATGTCT′] |
| 3902 | NM_005912.2(MC4R): c.289A > G | 4160 | MC4R | [′GGCTGATATGCTGGTGAGCGTTTCARATGG |
| | (p.Asn97Asp) | | | ATCAGAAACCATTGTCATCAC′] |
| 3903 | NM_005912.2(MC4R): c.185A > G | 4160 | MC4R | [′CTGGGTGTCATCAGCTTGTTGGAGARTATC |
| | (p.Asn62Ser) | | | TTAGTGATTGTGGCAATAGCC′] |
| 3904 | NM_000900.3(MGP): c.62 − 2A > G | 4256 | MGP | [′AAGATTCCATGCTTTCATGTGATTCHGAAA |
| | | | | TTAAAAAAAAAAGATTCATTA′] |
| 3905 | NM_012064.3(MEP): c.401A > G | 4284 | MEP | [′AGCGTGGGCCAGGCAACCACAGTGGRGAT |
| | (p.Glu134Gly) | | | CTTCCTGACGCTCCAGTTCGTG′] |
| 3906 | NM_000233.3(LHCGR): c.1733A > | −1 | — | [′AAAATGGCAATCCTCATCTTCACCGRTTTC |
| | G (p.Asp578Gly) | | | ACCTGCATGGCACCTATCTCT′] |
| 3907 | NM_000233.3(LHCGR): c.1691A > | −1 | — | [′CCAGAATTAATGGCTACCAATAAAGRTAC |
| | G (p.Asp564Gly) | | | AAAGATTGCTAAGAAAATGGCA′] |
| 3908 | NM_000894.2(LHB): c.221A > G | 3972 | LHB | [′CAGGCGGTCCTGCCGCCCCTGCCTCRGGTG |
| | (p.Gln74Arg) | | | GTGTGCACCTACCGTGATGTG′] |
| 3909 | NM_000238.3(KCNH2): c.1408A > | 3757 | KCNH2 | [′CATGTTCATTGTGGACATCCTCATCRACTT |
| | G (p.Asn470Asp) | | | CCGCACCACCTACGTCAATGC′] |
| 3910 | NM_001754.4(RUNX1): c.328A > G | 861 | RUNX1 | [′GCTGCCTACGCACTGGCGCTGCAACRAGA |
| | (p.Lys110Glu) | | | CCCTGCCCATCGCTTTCAAGGT′] |
| 3911 | NM_170707.3(LMNA): c.608A > G | 4000 | LMNA | [′AACAGGCTGCAGACCATGAAGGAGGDACT |
| | (p.Glu203Gly) | | | GGACTTCCAGAAGAACATCTAC′] |
| 3912 | NM_000421.3(KRT10): c.1315A > G | −1 | — | [′TGAATACCAACAACTCCTGGATATTDAGA |
| | (p.Lys439Glu) | | | TCCGACTGGAGAATGAAATTCA′] |
| 3913 | NM_000421.3(KRT10): c.1374 − | −1 | — | [′CCGCCGCGTCCGCCGCCTCCGGAACYAAA |
| | 2A > G | | | CGGGGTGAGGTCACATTCGGTT′] |
| 3914 | NM_000422.2(KRT17): c.274A > G | 3872 | KRT17 | [′TGAGAAGGCCACCATGCAGAACCTCVATG |
| | (p.Asn92Asp) | | | ACCGCCTGGCCTCCTACCTGGA′] |
| 3915 | NM_000422.2(KRT17): c.275A > G | 3872 | KRT17 | [′GAGAAGGCCACCATGCAGAACCTCARTGA |
| | (p.Asn92Ser) | | | CCGCCTGGCCTCCTACCTGGAC′] |
| 3916 | NM_005557.3(KRT16): c.374A > G | 3868 | KRT16 | [′GAGAAGGTGACCATGCAGAACCTCARTGA |
| | (p.Asn125Ser) | | | CCGCCTGGCCTCCTACCTGGAC′] |
| 3917 | NM_000526.4(KRT14): c.368A > G | 3861 | KRT14 | [′GAGAAGGTGACCATGCAGAACCTCARTGA |
| | (p.Asn123Ser) | | | CCGCCTGGCCTCCTACCTGGAC′] |
| 3918 | NM_000424.3(KRT5): c.1424A > G | 3852 | KRT5 | [′ATCGCCACTTACCGCAAGCTGCTGGRGGG |
| | (p.Glu475Gly) | | | CGAGGAATGCAGGTGAGTAGAC′] |
| 3919 | NM_000418.3(IL4R): c.223A > G | 3566 | IL4R | [′CTGTGTCTGCAGAGCCCACACGTGTNTCCC |
| | (p.Ile75Val) | | | TGAGAACAACGGAGGCGCGGG′] |
| 3920 | NM_001079817.1(INSR): c.1459A > | 3643 | INSR | [′CCAGGAGAGAAACGACATTGCCCTGRAGA |
| | G (p.Lys487Glu) | | | CCAATGGGGACCAGGCATCCTG′] |
| 3921 | NM_000208.2(INSR): c.707A > G | 3643 | INSR | [′TGCACCGCCGAAGGCCTCTGTTGCCRCAGC |
| | (p.His236Arg) | | | GAGTGCCTGGGCAACTGTTCT′] |
| 3922 | NM_000208.2(INSR): c.1466A > G | 3643 | INSR | [′AGAAACGACATTGCCCTGAAGACCARTGG |
| | (p.Asn489Ser) | | | GGACCAGGCATCCTGTAAGTCA′] |
| 3923 | NM_000208.2(INSR): c.1124 − 2A > G | 3643 | INSR | [′CTTCTAGCTCAGCTGCCAGATTGTCYAAGG |
| | | | | AAAGGAGAGAATATCCAGTGG′] |
| 3924 | NM_000208.2(INSR): c.1372A > G | 3643 | INSR | [′TCAGGGGAAACTCTTCTTCCACTATRACCC |
| | (p.Asn458Asp) | | | CAAACTCTGCTTGTCAGAAAT′] |
| 3925 | NM_000454.4(SOD1): c.131A > G | 6647 | SOD1 | [′ATTAAAGGACTGACTGAAGGCCTGCRTGG |
| | (p.His44Arg) | | | ATTCCATGTTCATGAGTTTGGA′] |
| 3926 | NM_000454.4(SOD1): c.302A > G | 6647 | SOD1 | [′GATGGTGTGGCCGATGTGTCTATTGRAGAT |
| | (p.Glu101Gly) | | | TCTGTGATCTCACTCTCAGGA′] |
| 3927 | NM_000454.4(SOD1): c.140A > G | 6647 | SOD1 | [′CTGACTGAAGGCCTGCATGGATTCCRTGTT |
| | (p.His47Arg) | | | CATGAGTTTGGAGATAATACA′] |
| 3928 | NM_000454.4(SOD1): c.242A > G | 6647 | SOD1 | [′ATCTGATGCTTTTTCATTATTAGGCRTGTT |
| | (p.His81Arg) | | | GGAGACTTGGGCAATGTGACT′] |
| 3929 | NM_000183.2(HADHB): c.788A > G | 3032 | HADHB | [′GCACAGGATGAAGGACTCCTTTCTGRTGTG |
| | (p.Asp263Gly) | | | GTACCCTTCAAAGTACCAGGT′] |
| 3930 | NM_000523.3(HOXD13): c.974A > | 3239 | HOXD13 | [′GAGAGACAAGTGACCATTTGGTTTCRGAA |
| | G (p.Gln325Arg) | | | CCGAAGAGTGAAGGACAAGAAA′] |
| 3931 | NM_000545.6(HNF1A): c.365A > G | 6927 | HNF1A | [′CGTGTGGCGAAGATGGTCAAGTCCTRCCT |
| | (p.Tyr122Cys) | | | GCAGCAGCACAACATCCCACAG′] |
| 3932 | NM_000519.3(HBD): c.-81A > G | 3045 | HBD | [′CTGGAGCAGGGAGGACAGGACCAGCRTAA |
| | | | | AAGGCAGGGCAGAGTCGACTGT′] |
| 3933 | NM_000518.4(HBB): c.199A > G | 3043 | HBB | [′CCCTAAGGTGAAGGCTCATGGCAAGRAAG |
| | (p.Lys67Glu) | | | TGCTCGGTGCCTTTAGTGATGG′] |
| 3934 | NM_000518.4(HBB): c.59A > G | 3043 | HBB | [′GTTACTGCCCTGTGGGGCAAGGTGARCGT |
| | (p.Asn20Ser) | | | GGATGAAGTTGGTGGTGAGGCC′] |
| 3935 | NM_000518.4(HBB): c.-81A > G | 3043 | HBB | [′GGGAGGGCAGGAGCCAGGGCTGGGCVTA |
| | | | | AAAGTCAGGGCAGAGCCATCTAT′] |
| 3936 | NM_000518.4(HBB): c.-50 − 29A > G | 3043 | HBB | [′GAGGGCAGGAGCCAGGGCTGGGCATRAAA |
| | | | | GTCAGGGCAGAGCCATCTATTG′] |
| 3937 | NM_000518.4(HBB): c.-78A > G | 3043 | HBB | [′AGGGCAGGAGCCAGGGCTGGGCATAVAA |
| | | | | GTCAGGGCAGAGCCATCTATTGC′] |
| 3938 | NM_000518.4(HBB): c.*113A > G | 3043 | HBB | [′TGAGCATCTGGATTCTGCCTAATAARAAAC |
| | | | | ATTTATTTTCATTGCAATGAT′] |
| 3939 | NM_000518.4(HBB): c.*112A > G | 3043 | HBB | [′TTGAGCATCTGGATTCTGCCTAATADAAAA |
| | | | | CATTTATTTTCATTGCAATGA′] |
| 3940 | NM_000518.4(HBB): c.*111A > G | 3043 | HBB | [′CTTGAGCATCTGGATTCTGCCTAATRAAAA |
| | | | | ACATTTATTTTCATTGCAATG′] |
| 3941 | NM_000518.4(HBB): c.80A > G | 3043 | HBB | [′GTGAACGTGGATGAAGTTGGTGGTGNGGC |
| | (p.Glu27Gly) | | | CCTGGGCAGGTTGGTATCAAGG′] |
| 3942 | NM_000518.4(HBB): c.247A > G | 3043 | HBB | [′TGGCCTGGCTCACCTGGACAACCTCVAGG |
| | (p.Lys83Glu) | | | GCACCTTTGCCACACTGAGTGA′] |
| 3943 | NM_000517.4(HBA2): c.1A > G | 3040 | HBA2 | [′CCCACAGACTCAGAGAGAACCCACCRTGG |
| | (p.Met1Val) | | | TGCTGTCTCCTGCCGACAAGAC′] |
| 3944 | NM_000517.4(HBA2): c.*92A > G | 3040 | HBA2 | [′CACCGGCCCTTCCTGGTCTTTGAATRAAGT |
| | | | | CTGAGTGGGCAGCAGCCTGTG′] |
| 3945 | NM_000517.4(HBA2): c.96 − 2A > G | 3040 | HBA2 | [′CACCCCTCACTCTGCTTCTCCCCGCRGGAT |
| | | | | GTTCCTGTCCTTCCCCACCAC′] |
| 3946 | NM_006121.3(KRT1): c.1445A > G | 3848 | KRT1 | [′GCCCTGGATCTGGAGATTGCCACCTRCAG |
| | (p.Tyr482Cys) | | | GACCCTCCTGGAGGGAGAAGAA′] |
| 3947 | NM_001077488.3(GNAS): c.1A > G | 2778 | GNAS | [′GCGCCCCGCCGCCGCCGCCGCCGCCRTGG |
| | (p.Met1Val) | | | GCTGCCTCGGGAACAGTAAGAC′] |
| 3948 | NM_000516.5(GNAS): c.680A > G | 2778 | GNAS | [′ACCAGCATGTTTGACGTGGGTGGCCDGCG |
| | (p.Gln227Arg) | | | CGATGAACGCCGCAAGTGGATC′] |
| 3949 | NM_000515.4(GH1): c.413A > G | 2688 | GH1 | [′GGCGCCTCTGACAGCAACGTCTATGRCCTC |
| | (p.Asp138Gly) | | | CTAAAGGACCTAGAGGAAGGC′] |
| 3950 | NM_000823.3(GHRHR): c.985A > G | 2692 | GHRHR | [′TTGTCTTTCCTGCAGGCGTCTCTCCRAGTC |
| | (p.Lys329Glu) | | | GACACTTTTCCTGATCCCACT′] |
| 3951 | NM_002890.2(RASA1): c.1198A > G | 5921 | RASA1 | [′GACCAATGAAAATATTCAGCGATTTRAAA |
| | (p.Lys400Glu) | | | TATGTCCAACGCCAAACAATCA′] |
| 3952 | NM_002890.2(RASA1): c.1201A > G | 5921 | RASA1 | [′CAATGAAAATATTCAGCGATTTAAARTAT |
| | (p.Ile401Val) | | | GTCCAACGCCAAACAATCAGTT′] |
| 3953 | NM_000406.2(GNRHR): c.317A > G | 2798 | GNRHR | [′GATGGGATGTGGAACATTACAGTCCRATG |
| | (p.Gln106Arg) | | | GTATGCTGGAGAGTTACTCTGC′] |
| 3954 | NM_000406.2(GNRHR): c.851A > G | 2798 | GNRHR | [′TTTACTGTCTGCTGGACTCCCTACTRTGTC |
| | (p.Tyr284Cys) | | | CTAGGAATTTGGTATTGGTTT′] |
| 3955 | NM_000407.4(GP1BB): c.338A > G | −1 | — | [′GCCGGCCGCCCCGAGCGTGCGCCCTDCCG |
| | (p.Tyr113Cys) | | | CGACCTGCGTTGCGTGGCGCCC′] |
| 3956 | NM_021957.3(GYS2): c.116A > G | 2998 | GYS2 | [′TTTGAAGTTGCTTGGGAAGTGACCARTAA |
| | (p.Asn39Ser) | | | AGGTTTGTACTGCTCCTGAAGG′] |
| 3957 | NM_001146040.1(GLRA1): c.920A > | 2741 | GLRA1 | [′CCTCCACCCCCACTCTAGGTGTCCTVTGTG |
| | G (p.Tyr307Cys) | | | AAAGCCATTGACATTTGGATG′] |
| 3958 | NM_001146040.1(GLRA1): c.910A > | 2741 | GLRA1 | [′CTCCGGCTCTCGAGCATCTCTGCCCRAGGT |
| | G (p.Lys304Glu) | | | AAGTCCCATTGCCCAAGAGCA′] |
| 3959 | NM_000171.3(GLRA1): c.523A > G | 2741 | GLRA1 | [′CCCCATGGACTTGAAGAATTTCCCCRTGGA |
| | (p.Met175Val) | | | TGTCCAGACATGTATCATGCA′] |
| 3960 | NM_000162.3(GCK): c.641A > G | 2645 | GCK | [′ACGGTGGCCACGATGATCTCCTGCTRCTAC |
| | (p.Tyr214Cys) | | | GAAGACCATCAGTGCGAGGTC′] |
| 3961 | NM_000145.3(FSHR): c.1345A > G | 2492 | FSHR | [′AGGCTGTGATGCTGCTGGCTTTTTCRCTGT |
| | (p.Thr449Ala) | | | CTTTGCCAGTGAGCTGTCAGT′] |
| 3962 | NM_182925.4(FLT4): c.3104A > G | 2324 | FLT4 | [′CGCCTCCCCGCACCCCAGTGCATCCRCAGA |
| | (p.His1035Arg) | | | GACCTGGCTGCTCGGAACATT′] |
| 3963 | NM_023110.2(FGFR1): c.1121A > G | 2260 | FGFR1 | [′CCGGCAGTGATGACCTCGCCCCTGTRCCTG |
| | (p.Tyr374Cys) | | | GAGATCATCATCTATTGCACA′] |
| 3964 | NM_006894.5(FMO3): c.182A > G | 2328 | FMO3 | [′AGCATTTACAAATCAGTCTTTTCCARCTCT |
| | (p.Asn61Ser) | | | TCCAAAGAGATGATGTGTTTC′] |
| 3965 | NM_001002294.2(FMO3): c.923A > | 2328 | FMO3 | [′AAGCCTAACGTGAAGGAATTCACAGRGAC |
| | G (p.Glu308Gly) | | | CTCGGCCATTTTTGAGGATGGG′] |
| 3966 | NM_212482.1(FN1): c.2918A > G | 2335 | FN1 | [′ACCGGGCTGTCCCCTGGGGTCACCTRTTAC |
| | (p.Tyr973Cys) | | | TTCAAAGTCTTTGCAGTGAGC′] |
| 3967 | NM_000142.4(FGFR3): c.1948A > G | 2261 | FGFR3 | [′CGTGCACAACCTCGACTACTACAAGVAGA |
| | (p.Lys650Glu) | | | CAACCAACGTGAGCCCGGCCCT′] |
| 3968 | NM_000142.4(FGFR3): c.1118A > G | 2261 | FGFR3 | [′GAGGCTGACGAGGCGGGCAGTGTGTRTGC |
| | (p.Tyr373Cys) | | | AGGCATCCTCAGCTACGGGGTG] |
| 3969 | NM_000142.4(FGFR3): c.1612A > G | 2261 | FGFR3 | [′GTGCAGGCGCCCAGCAGGTTGATGAYGTT |
| | (p.Ile538Val) | | | TTTGTGTTTCCCGATCATCTTC′] |
| 3970 | NM_000142.4(FGFR3): c.1619A > G | 2261 | FGFR3 | [′GCCCTGCGTGCAGGCGCCCAGCAGGBTGA |
| | (p.Asn540Ser) | | | TGATGTTTTTGTGTTTCCCGAT′] |
| 3971 | NM_000142.4(FGFR3): c.833A > G | 2261 | FGFR3 | [′GACGTGGAGTTCCACTGCAAGGTGTRCAG |
| | (p.Tyr278Cys) | | | TGACGCACAGCCCCACATCCAG] |
| 3972 | NM_000138.4(FBN1): c.6431A > G | 2200 | FBN1 | [′GTCTGTAAACATGGACAGTGCATCARTAC |
| | (p.Asn2144Ser) | | | AGATGGTTCCTATCGCTGCGAG] |
| 3973 | NM_000138.4(FBN1): c.3128A > G | 2200 | FBN1 | [′ATACCCAGCCTCTGCACCCACGGCARGTG |
| | (p.Lys1043Arg) | | | CAGAAACACCATTGGCAGCTTT′] |
| 3974 | NM_000138.4(FBN1): c.2261A > G | 2200 | FBN1 | [′TATAAATGTATATGCAATTCAGGATRTGAA |
| | (p.Tyr754Cys) | | | GTGGATTCAACTGGGAAAAAC′] |
| 3975 | NM_000146.3(FTL): c.-160A > G | 2512 | FTL | [′CCGCGGGTCTGTCTCTTGCTTCAACRGTGT |
| | | | | TTGGACGGAACAGATCCGGGG′] |
| 3976 | NM_000043.4(FAS): c.695A > G | 355 | FAS | [′TTTTCAGATGTTGACTTGAGTAAATRTATC |
| | (p.Tyr232Cys) | | | ACCACTATTGCTGGAGTCATG] |
| 3977 | NM_000043.4(FAS): c.763A > G | 355 | FAS | [′AGGCTTTGTTCGAAAGAATGGTGTCRATG |
| | (p.Asn255Asp) | | | AAGCCAAAATAGATGAGATCAA′] |
| 3978 | NM_000043.4(FAS): c.353A > G | 355 | FAS | [′TTTCTAGGCTTAGAAGTGGAAATAARCTGC |
| | (p.Asn118Ser) | | | ACCCGGACCCAGAATACCAAG′] |
| 3979 | NM_000129.3(F13A1): c.851A > G | 2162 | F13A1 | [′CTCGTTGGATCCTGGGACAATATCTRTGCC |
| | (p.Tyr284Cys) | | | TATGGCGTCCCCCCATCGGCC′] |
| 3980 | NM_000121.3(EPOR): c.1460A > G | 2057 | EPOR | [′GGCTTATCCGATGGCCCCTACTCCARCCCT |
| | (p.Asn487Ser) | | | TATGAGAACAGCCTTATCCCA′] |
| 3981 | NM_207034.2(EDN3): c.335A > G | 1908 | EDN3 | [′GACAAGGAGTGTGTCTACTATTGCCRCCTG |
| | (p.His112Arg) | | | GACATCATTTGGATCAACACT′] |
| 3982 | NM_001257988.1(TYMP): c.665A > | 1890 | TYMP | [′CAGAGCGGACAGCCCCTCCACGAGTYTCT |
| | G (p.Lys222Arg) | | | TACTGAGAATGGAGGCTTTGGG′] |
| 3983 | NM_003286.2(TOP1): c.1598A > G | −1 | — | [′GTAGAGTTTGACTTCCTCGGGAAGGRCTCC |
| | (p.Asp533Gly) | | | ATCAGATACTATAACAAGGTC′] |
| 3984 | NM_001943.3(DSG2): c.797A > G | 1829 | DSG2 | [′GTTCAGATTCGTATTTTGGATGTCARTGAC |
| | (p.Asn266Ser) | | | AATATACCTGTAGTAGAAAAT′] |
| 3985 | NM_001943.3(DSG2): c.1880 − | 1829 | DSG2 | [′TCTGTGTTCAATTTTGTGTCTGTACRGTGG |
| | 2A > G | | | TACCACTTTTACTGCTGATGT′] |
| 3986 | NM_024422.4(DSC2): c.631 − 2A > G | 1824 | DSC2 | [′TTTCTCCTTATTTTACTCTCTTCACRGATAA |
| | | | | TTGCCTTTGCAACAACTCCA′] |
| 3987 | NG_012088.1: g.2209A > G | 3586 | IL10 | [′CCAGGATGGTCTCGATCTCCTGACCYTATG |
| | | | | ATCCGCCCGCCTTGGCCTCCC′] |
| 3988 | NM_000498.3(CYP11B2): c.1492A > | −1 | — | [′GAGGCCTGGCACGTCCCCCCTCCTCRCTTT |
| | G (p.Thr498Ala) | | | CAGAGCGATTAACTAGTCTTG′] |
| 3989 | NM_000941.2(POR): c.1733A > G | 5447 | POR | [′CGCCGCTCGGATGAGGACTACCTGTRCCG |
| | (p.Tyr578Cys) | | | GGAGGAGCTGGCGCAGTTCCAC′] |
| 3990 | NM_000941.2(POR): c.15A > G | 5447 | POR | [′CTAACAGTTTCATGATCAACATGGGRGACT |
| | (p.Gly5=) | | | CCCACGTGGACACCAGCTCCA′] |
| 3991 | NM_001885.2(CRYAB): c.358A > G | 1410 | CRYAB | [′TGGTTTCATCTCCAGGGAGTTCCACRGGAA |
| | (p.Arg120Gly) | | | ATACCGGATCCCAGCTGATGT′] |
| 3992 | NM_021954.3(GJA3): c.188A > G | 2700 | GJA3 | [′AACACCCAGCAGCCGGGCTGCGAGARCGT |
| | (p.Asn63Ser) | | | CTGCTACGACAGGGCCTTCCCC′] |
| 3993 | NM_004004.5(GJB2): c.218A > G | 2706 | GJB2 | [′TACGATCACTACTTCCCCATCTCCCRCATC |
| | (p.His73Arg) | | | CGGCTATGGGCCCTGCAGCTG′] |
| 3994 | NM_001735.2(C5): c.1115A > G | 727 | C5 | [′CGTCTACCCCCTCACCCAATCTACCYTGAT |
| | (p.Lys372Arg) | | | GGGATATGGAATCCCAGGCTT′] |
| 3995 | NM_001848.2(COL6A1): c.362A > | 1291 | COL6A1 | [′CTCAAAAGCAGCGTGGACGCGGTCARGTA |
| | G (p.Lys121Arg) | | | CTTTGGGAAGGGCACCTACACC′] |
| 3996 | NM_000093.4(COL5A1): c.655 − | 1289 | COL5A1 | [′TTTTCATGAGCGTCTCTTCTTTTCCRGGGTG |
| | 2A > G | | | ACATCCAGCAGCTGCTCTTT′] |
| 3997 | NM_000089.3(COL1A2): c.226 − | 1278 | COL1A2 | [′TATAATTTTTTTTTTTTACTTCTCTRGAACT |
| | 2A > G | | | TTGCTGCTCAGTATGATGGA′] |
| 3998 | NM_000089.3(COL1A2): c.70 + 717A > | 1278 | COL1A2 | [′GAGTGGGTACATTCTGAAAAGTAATRTAA |
| | G | | | GTGTCTCAATTCACTTTCTAGT′] |
| 3999 | NM_001844.4(COL2A1): c.4172A > | 1280 | COL2A1 | [′ACGGAAGGCTCCCAGAACATCACCTRCCA |
| | G (p.Tyr1391Cys) | | | CTGCAAGAACAGCATTGCCTAT′] |
| 4000 | NM_001844.4(COL2A1): c.2974A > | 1280 | COL2A1 | [′CGGTCTGCCTGGGCAACGTGGTGAGRGAG |
| | G (p.Arg992Gly) | | | GATTCCCTGGCTTGCCTGGCCC′] |
| 4001 | NM_000493.3(COL10A1): c.1790A > | −1 | — | [′TTTACTTGTCAGATACCAGGAATATRCTAT |
| | G (p.Tyr597Cys) | | | TTTTCATACCACGTGCATGTG′] |
| 4002 | NM_004385.4(VCAN): c.4004 − | 1462 | VCAN | [′GTATTGTGAAAACTCTGTTTTTTTCDGGTC |
| | 2A > G | | | GAATGAGTGATTTGAGTGTAA′] |
| 4003 | NM_020549.4(CHAT): c.1444A > G | 1103 | CHAT | [′CGTCAGCGAGCTCCCCGCCCCCCGGVGGC |
| | (p.Arg482Gly) | | | TGCGGTGGAAATGCTCCCCGGA′] |
| 4004 | NM_000078.2(CETP): c.1376A > G | 1071 | CETP | [′AACAGCAAAGGCGTGAGCCTCTTCGRCAT |
| | (p.Asp459Gly) | | | CATCAACCCTGAGATTATCACT′] |
| 4005 | NM_000083.2(CLCN1): c.1655A > G | 1180 | CLCN1 | [′GTGATTTGCTTCGAATTAACGGGTCDGATT |
| | (p.Gln552Arg) | | | GCTCACATCCTGCCCATGATG′] |
| 4006 | NM_000083.2(CLCN1): c.382A > G | 1180 | CLCN1 | [′CTTTCTGGTGCTTCTGGGACTGCTGRTGGC |
| | (p.Met128Val) | | | TCTGGTCAGCTGGAGCATGGA′] |
| 4007 | NM_199440.1(HSPD1): c.86A > G | 3329 | HSPD1 | [′CATCTCACTCGGGCTTATGCCAAAGRTGTA |
| | (p.Asp29Gly) | | | AAATTTGGTGCAGATGCCCGA′] |
| 4008 | NM_001904.3(CTNNB1): c.95A > G | 1499 | CTNNB1 | [′CACTGGCAGCAACAGTCTTACCTGGNCTCT |
| | (p.Asp32Gly) | | | GGAATCCATTCTGGTGCCACT′] |
| 4009 | NM_001904.3(CTNNB1): c.121A > | 1499 | CTNNB1 | [′CTCTGGAATCCATTCTGGTGCCACTNCCAC |
| | G (p.Thr41Ala) | | | AGCTCCTTCTCTGAGTGGTAA′] |
| 4010 | NM_007294.3(BRCA1): c.211A > G | 672 | BRCA1 | [′TTTATGTAAGAATGATATAACCAAARGGT |
| | (p.Arg71Gly) | | | ATATAATTTGGTAATGATGCTA′] |
| 4011 | NM_001202.3(BMP4): c.278A > G | 652 | BMP4 | [′GATCTTTACCGGCTTCAGTCTGGGGRGGAG |
| | (p.Glu93Gly) | | | GAGGAAGAGCAGATCCACAGC′] |
| 4012 | NM_000342.3(SLC4A1): c.166A > G | 6521 | SLC4A1 | [′CACCACATCACACCCGGGTACCCACRAGG |
| | (p.Lys56Glu) | | | TGAGGACCCCAGCCTCCTCCGT′] |
| 4013 | NM_000342.3(SLC4A1): c.2509A > | 6521 | SLC4A1 | [′GAAGACCTGGCGCATGCACTTATTCRCGG |
| | G (p.Thr837Ala) | | | GCATCCAGATCATCTGCCTGGC′] |
| 4014 | NM_001681.3(ATP2A2): c.2300A > | 488 | ATP2A2 | [′TTCATCCGCTACCTCATCTCGTCCARCGTC |
| | G (p.Asn767Ser) | | | GGGGAAGTTGTCTGGTAGGTC′] |
| 4015 | NM_000486.5(AQP2): c.203A > G | 359 | AQP2 | [′GGCCACATAAGCGGGGCCCACATCAVCCC |
| | (p.Asn68Ser) | | | TGCCGTGACTGTGGCCTGCCTG′] |
| 4016 | NM_000041.3(APOE): c.237 − 2A > G | 348 | APOE | [′GACACCCTCCCGCCCTCTCGGCCGCRGGGC |
| | | | | GCTGATGGACGAGACCATGAA′] |
| 4017 | NM_000041.3(APOE): c.490A > G | 348 | APOE | [′CGCCTCCCACCTGCGCAAGCTGCGTVAGC |
| | (p.Lys164Glu) | | | GGCTCCTCCGCGATGCCGATGA′] |
| 4018 | NM_000041.3(APOE): c.178A > G | 348 | APOE | [′TTGGGATTACCTGCGCTGGGTGCAGRCACT |
| | (p.Thr60Ala) | | | GTCTGAGCAGGTGCAGGAGGA′] |
| 4019 | NM_000040.1(APOC3): c.280A > G | 345 | APOC3 | [′GGATTTGGACCCTGAGGTCAGACCARCTTC |
| | (p.Thr94Ala) | | | AGCCGTGGCTGCCTGAGACCT′] |
| 4020 | NM_000040.1(APOC3): c.232A > G | 345 | APOC3 | [′CCTGAAAGACTACTGGAGCACCGTTRAGG |
| | (p.Lys78Glu) | | | ACAAGTTCTCTGAGTTCTGGGA′] |
| 4021 | NM_001042425.1(TFAP2A): c.751A > | 7020 | TFAP2A | [′GTCGCTGCTGGGCGGAGTGCTCCGGVGGT |
| | G (p.Arg251Gly) | | | GAGGCCCGGCACGGCCCCGCCC′] |
| 4022 | NM_000488.3(SERPINC1): c.655A > | 462 | SERPINC1 | [′TGCAGAGCAATCCAGAGCGGCCATCRACA |
| | G (p.Asn219Asp) | | | AATGGGTGTCCAATAAGACCGA′] |
| 4023 | NM_001085.4(SERPINA3): c.1240A > | 12 | SERPINA3 | [′TACAGACACCCAGAACATCTTCTTCRTGAG |
| | G (p.Met414Val) | | | CAAAGTCACCAATCCCAAGCA′] |
| 4024 | NM_001148.4(ANK2): c.4373A > G | 287 | ANK2 | [′TGCATGGCATCTTGGGGCGGAAAGGRATC |
| | (p.Glu1458Gly) | | | AGAGTCAGATCAAGAACAGGAG′] |
| 4025 | NM_001145.4(ANG): c.121A > G | −1 | — | [′CTTCCTGACCCAGCACTATGATGCCRAACC |
| | (p.Lys41Glu) | | | ACAGGGCCGGGATGACAGATA′] |
| 4026 | NM_001145.4(ANG): c.208A > G | −1 | — | [′ACCCTGCAAAGACATCAACACATTTRTTCA |
| | (p.Ile70Val) | | | TGGCAACAAGCGCAGCATCAA′] |
| 4027 | NM_000484.3(APP): c.2146A > G | 351 | APP | [′GGGCGGTGTTGTCATAGCGACAGTGRTCG |
| | (p.Ile716Val) | | | TCATCACCTTGGTGATGCTGAA′] |
| 4028 | NM_000484.3(APP): c.2078A > G | 351 | APP | [′TTTGTTTTCAAGGTGTTCTTTGCAGRAGAT |
| | (p.Glu693Gly) | | | GTGGGTTCAAACAAAGGTGCA′] |
| 4029 | NM_000484.3(APP): c.2140A > G | 351 | APP | [′CATGGTGGGCGGTGTTGTCATAGCGRCAG |
| | (p.Thr714Ala) | | | TGATCGTCATCACCTTGGTGAT′] |
| 4030 | NM_000021.3(PSEN1): c.488A > G | 5663 | PSEN1 | [′AAATGCTTTCTTTTCTAGGTCATCCRTGCC |
| | (p.His163Arg) | | | TGGCTTATTATATCATCTCTA′] |
| 4031 | NM_000021.3(PSEN1): c.415A > G | 5663 | PSEN1 | [′GCACTCAATTCTGAATGCTGCCATCRTGAT |
| | (p.Met139Val) | | | CAGTGTCATTGTTGTCATGAC′] |
| 4032 | NM_000021.3(PSEN1): c.436A > G | 5663 | PSEN1 | [′CATCATGATCAGTGTCATTGTTGTCNTGAC |
| | (p.Met146Val) | | | TATCCTCCTGGTGGTTCTGTA′] |
| 4033 | NM_000021.3(PSEN1): c.839A > G | 5663 | PSEN1 | [′GTTGAAACAGCTCAGGAGAGAAATGVAAC |
| | (p.Glu280Gly) | | | GCTTTTTCCAGCTCTCATTTAC′] |
| 4034 | NM_000021.3(PSEN1): c.998A > G | 5663 | PSEN1 | [′CAAGACACTGTTGCAGAGAATGATGRTGG |
| | (p.Asp333Gly) | | | CGGGTTCAGTGAGGAATGGGAA′] |
| 4035 | NM_000034.3(ALDOA): c.386A > G | 226 | ALDOA | [′CCCCTTCCTCTTCTCTTAGGGTTGGRTGGG |
| | (p.Asp129Gly) | | | CTGTCTGAGCGCTGTGCCCAG′] |
| 4036 | NM_000477.5(ALB): c.714 − 2A > G | 213 | ALB | [′CATTTTGATTGGCGATTTTCTTTTTDGGGC |
| | | | | AGTAGCTCGCCTGAGCCAGAG′] |
| 4037 | NM_001151.3(SLC25A4): c.311A > | 291 | SLC25A4 | [′AAGCAGCTCTTCTTAGGGGGTGTGGRTCG |
| | G (p.Asp104Gly) | | | GCATAAGCAGTTCTGGCGCTAC′] |
| 4038 | NM_013411.4(AK2): c.1A > G | 204 | AK2 | [′GTGGCAGTGAGAGACTTCGGCGGACRTGG |
| | (p.Met1Val) | | | CTCCCAGCGTGCCAGCGGCAGA′] |
| 4039 | NM_013411.4(AK2): c.494A > G | 204 | AK2 | [′AACCCTCCAAAAGAGCCCATGAAAGRTGA |
| | (p.Asp165Gly) | | | CGTATGTAAACTCAGGACAAAA′] |
| 4040 | NM_000476.2(AK1): c.491A > G | 203 | AK1 | [′GCCACAGAACCCGTCATCGCCTTCTRTGAG |
| | (p.Tyr164Cys) | | | AAACGTGGCATTGTGCGCAAG′] |
| 4041 | NM_001100.3(ACTA1): c.350A > G | 58 | ACTA1 | [′GAGGCCCCCCTCAATCCCAAGGCCARCCG |
| | (p.Asn117Ser) | | | CGAGAAGATGACCCAGATCATG′] |
| 4042 | NM_001103.3(ACTN2): c.26A > G | 88 | ACTN2 | [′ATGAACCAGATAGAGCCCGGCGTGCRGTA |
| | (p.Gln9Arg) | | | CAACTACGTGTACGACGAGGAT′] |
| 4043 | NM_005159.4(ACTC1): c.1088A > G | −1 | — | [′CAGCAAATGTGGATTAGCAAGCAAGRGTA |
| | (p.Glu363Gly) | | | CGATGAGGCAGGCCCATCCATT′] |
| 4044 | NM_005159.4(ACTC1): c.373A > G | −1 | — | [′CAACCGGGAGAAGATGACTCAGATCRTGT |
| | (p.Met125Val) | | | TTGAGACCTTCAATGTCCCTGC′] |
| 4045 | NM_018109.3(MTPAP): c.1432A > | 55149 | MTPAP | [′TGATTCTTCTCCTCTGTACATTCAGRATCC |
| | G (p.Asn478Asp) | | | ATTTGAAACTTCTCTCAACAT′] |
| 4046 | NM_016955.3(SEPSECS): c.1001A > | 51091 | SEPSECS | [′TTATTGTCACTTGGATCAAATGGCTRTAAG |
| | G (p.Tyr334Cys) | | | AAGCTACTAAAAGAAAGAAAG′] |
| 4047 | NM_014053.3(FLVCR1): c.361A > | 28982 | FLVCR1 | [′GATCTTCAGCCTGTACTCGCTGGTCRACGC |
| | G (p.Asn121Asp) | | | CTTTCAGTGGATCCAGTACAG′] |
| 4048 | NM_000021.3(PSEN1): c.697A > G | 5663 | PSEN1 | [′ATATCTCATTATGATTAGTGCCCTCDTGGC |
| | (p.Met233Val) | | | CCTGGTGTTTATCAAGTACCT′] |
| 4049 | NM_000207.2(INS): c.323A > G | −1 | — | [′TGCTCCCTCTACCAGCTGGAGAACTRCTGC |
| | (p.Tyr108Cys) | | | AACTAGACGCAGCCCGCAGGC′] |
| 4050 | NM_000334.4(SCN4A): c.4078A > G | 6329 | SCN4A | [′GAAGCAGGCCTTCGACATCACCATCRTGA |
| | (p.Met1360Val) | | | TCCTCATCTGCCTCAACATGGT′] |
| 4051 | NM_000334.4(SCN4A): c.4108A > G | 6329 | SCN4A | [′CCTCATCTGCCTCAACATGGTCACCRTGAT |
| | (p.Met1370Val) | | | GGTGGAGACAGACAACCAGAG′] |
| 4052 | NM_000518.4(HBB): c.316 − 2A > G | 3043 | HBB | [′TTCATACCTCTTATCTTCCTCCCACVGCTCC |
| | | | | TGGGCAACGTGCTGGTCTGT′] |
| 4053 | NM_000525.3(KCNJ11): c.155A > G | 3767 | KCNJ11 | [′GTGGCCCACAAGAACATCCGGGAGCRGGG |
| | (p.Gln52Arg) | | | CCGCTTCCTGCAGGACGTGTTC′] |
| 4054 | NM_000525.3(KCNJ11): c.544A > G | 3767 | KCNJ11 | [′AGCCCACCGCAGGGCTGAGACCCTCRTCTT |
| | (p.Ile182Val) | | | CAGCAAGCATGCGGTGATCGC′] |
| 4055 | NM_000525.3(KCNJ11): c.886A > G | 3767 | KCNJ11 | [′GGAAGGCGTGGTGGAAACCACGGGCVTCA |
| | (p.Ile296Val) | | | CCACCCAGGCCCGCACCTCCTA′] |
| 4056 | NM_000525.3(KCNJ11): c.989A > G | 3767 | KCNJ11 | [′GAGGACGGACGTTACTCTGTGGACTRCTCC |
| | (p.Tyr330Cys) | | | AAGTTTGGCAACACCGTCAAA′] |
| 4057 | NM_000528.3(MAN2B1): c.1831 − | 4125 | MAN2B1 | [′CCCATCTGTGGACCCTTTTCTGCCCRGCAC |
| | 2A > G | | | ATCCGGGCAACGTTTGATCCT′] |
| 4058 | NM_000639.2(FASLG): c.466A > G | 356 | FASLG | [′ATTTATTTCAGGCAAGTCCAACTCARGGTC |
| | (p.Arg156Gly) | | | CATGCCTCTGGAATGGGAAGA′] |
| 4059 | NM_000920.3(PC): c.1705A > G | 5091 | PC | [′CCCGGGGCTGCTGCTGATGGACACGRCCTT |
| | (p.Thr569Ala) | | | CAGGGACGCCCACCAGTCACT′] |
| 4060 | NM_001017420.2(ESCO2): c.1132 − | 157570 | ESCO2 | [′AATGGGTTTCTTTTTTTACCCCCCARTTATA |
| | 7A > G | | | GGACGCTGGTCAGAAACATT′] |
| 4061 | NM_001017420.2(ESCO2): c.1674 − | 157570 | ESCO2 | [′ATTAAATCATCTTTTCTTCTCTTTTRGGAAT |
| | 2A > G | | | TGCTTCATGTTTGGCTGTTT′] |
| 4062 | NM_001129765.1(NSDHL): c.1046A > | 50814 | NSDHL | [′GAGAGAGCCAAAAAGGCCATGGGCTVCCA |
| | G (p.Tyr349Cys) | | | GCCACTAGTGACCATGGATGAT′] |
| 4063 | NM_001701.3(BAAT): c.967A > G | 570 | BAAT | [′AGAGGCCCAGGGGCAATTCCTCTTCRTTGT |
| | (p.Ile323Val) | | | AGGAGAAGGTGATAAGACTAT′] |
| 4064 | NM_002977.3(SCN9A): c.406A > G | 6335 | SCN9A | [′ATTCAGCATGCTCATCATGTGCACTRTTCT |
| | (p.Ile136Val) | | | GACAAACTGCATATTTATGAC′] |
| 4065 | NM_004004.5(GJB2): c.487A > G | 2706 | GJB2 | [′CTATGTCATGTACGACGGCTTCTCCRTGCA |
| | (p.Met163Val) | | | GCGGCTGGTGAAGTGCAACGC′] |
| 4066 | NM_004519.3(KCNQ3): c.1403A > | 3786 | KCNQ3 | [′GAACCAAAGCCTGTTGGCTTAAACARTAA |
| | G (p.Asn468Ser) | | | AGAGCGTTTCCGCACGGCCTTC′] |
| 4067 | NM_004519.3(KCNQ3): c.2462A > | 3786 | KCNQ3 | [′AGAGATGATTATGTGTTCGGCCCCARTGG |
| | G (p.Asn821Ser) | | | GGGGTCGAGCTGGATGAGGGAG′] |
| 4068 | NM_004519.3(KCNQ3): c.914A > G | 3786 | KCNQ3 | [′AAAGAGGAGTTTGAGACCTATGCAGRTGC |
| | (p.Asp305Gly) | | | CCTGTGGTGGGGCCTGGTGAGT′] |
| 4069 | NM_004525.2(LRP2): c.770 − 2A > G | 4036 | LRP2 | [′TGTAACTCTCTCTTTTTCCCCCCACRGAAA |
| | | | | GCGGTCCTCATGATGTTCATA′] |
| 4070 | NM_007375.3(TARDBP): c.1055A > | 23435 | TARDBP | [′CAGAACCAGTCAGGCCCATCGGGTARTAA |
| | G (p.Asn352Ser) | | | CCAAAACCAAGGCAACATGCAG′] |
| 4071 | NM_007375.3(TARDBP): c.800A > | 23435 | TARDBP | [′AATGCCGAACCTAAGCACAATAGCARTAG |
| | G (p.Asn267Ser) | | | ACAGTTAGAAAGAAGTGGAAGA′] |
| 4072 | NM_012434.4(SLCl7A5): c.406A > | 26503 | SLC17A5 | [′ATATGTTGCCAGCAAAATAGGGGGGDAAA |
| | G (p.Lys136Glu) | | | TGCTGCTAGGATTTGGGATCCT′] |
| 4073 | NM_012463.3(ATP6V0A2): c.732 − | 23545 | ATP6V0A2 | [′AGACTGTGTTCAACTCTTGTCTTCCRGCTA |
| | 2A > G | | | CCACTGCCACGTGTACCCCTA′] |
| 4074 | NM_014043.3(CHMP2B): c.85A > G | 25978 | CHMP2B | [′GTTACGAGGTACACAGAGGGCTATARTCA |
| | (p.Ile29Val) | | | GAGATCGAGCAGCTTTAGAGAA′] |
| 4075 | NM_018136.4(ASPM): c.2761 − | 259266 | ASPM | [′AGCAAAATTATAATATTGGAATATARTATC |
| | 25A > G | | | TGGAACTTATTTCTTTATAGG′] |
| 4076 | NM_022081.5(HPS4): c.461A > G | 89781 | HPS4 | [′ATTCTGAAAAACACCAGTGATCTGCRTAA |
| | (p.His154Arg) | | | GATTTTCAATTCCCTCTGGAAC′] |
| 4077 | NM_024649.4(BBS1): c.1340 − | −1 | — | [′GTCAGCCTCTGGGACCCTTCTCCACRGCCA |
| | 2A > G | | | TGCACCGGGCCTTCCAGACAG′] |
| 4078 | NM_032520.4(GNPTG): c.610 − | 84572 | GNPTG | [′TGCTGCCCCTGCATCCTCCACCTTCRGGGC |
| | 2A > G | | | CATGAGAAGTTGCTGAGGACA′] |
| 4079 | NM_172107.2(KCNQ2): c.1A > G | 3785 | KCNQ2 | [′CCCGGGGCGCCTCCCGCCAGGCACCRTGG |
| | (p.MetlVal) | | | TGCAGAAGTCGCGCAACGGCGG′] |
| 4080 | NM_172107.2(KCNQ2): c.356A > G | 3785 | KCNQ2 | [′GTGTTTTCCACCATCAAGGAGTATGRGAA |
| | (p.Glu119Gly) | | | GAGCTCGGAGGGGGCCCTCTAC′] |
| 4081 | NM_172107.2(KCNQ2): c.622A > G | 3785 | KCNQ2 | [′CCTGCGCTTCCTGCAGATTCTGCGGRTGAT |
| | (p.Met208Val) | | | CCGCATGGACCGGCGGGGAGG′] |
| 4082 | NM_172107.2(KCNQ2): c.635A > G | 3785 | KCNQ2 | [′CAGATTCTGCGGATGATCCGCATGGRCCG |
| | (p.Asp212Gly) | | | GCGGGGAGGCACCTGGAAGCTG′] |
| 4083 | NM_172107.2(KCNQ2): c.773A > G | 3785 | KCNQ2 | [′GTGTACTTGGCAGAGAAGGGGGAGARCGA |
| | (p.Asn258Ser) | | | CCACTTTGACACCTACGCGGAT′] |
| 4084 | NM_172107.2(KCNQ2): c.1764 − | 3785 | KCNQ2 | [′ATGCTTTGGGGTCTCTGTTCCCGGTRGAGT |
| | 2A > G | | | GGACCAGATCGTGGGGCGGGG′] |
| 4085 | NM_000495.4(COL4A5): c.1A > G | 1287 | COL4A5 | [′AAGGAGCTGCGGGAGCCGGAGAAGARTG |
| | (p.Met1Val) | | | AAACTGCGTGGAGTCAGCCTGGC′] |
| 4086 | NM_000495.4(COL4A5): c.466 − | 1287 | COL4A5 | [′AGAACTTCCATTGATGGCTTCTTTTRGGGT |
| | 2A > G | | | GAACCAGGTAGTATAATTATG′] |
| 4087 | NM_000495.4(COL4A5): c.547 − | 1287 | COL4A5 | [′TCATTTTCTTTACTCACTTTATAACRGGGC |
| | 2A > G | | | CTACCTGGTCCCACTGGTATA′] |
| 4088 | NM_000495.4(COL4A5): c.610 − | 1287 | COL4A5 | [′ATTTTCTCTTTTGTCTTCTCTTCTTRGGGCC |
| | 2A > G | | | CTCCTGGTCCACCAGGACTT′] |
| 4089 | NM_000495.4(COL4A5): c.892 − | 1287 | COL4A5 | [′GCCCTATCATTTCTTTGTATCCTATRGGGT |
| | 2A > G | | | AAACCAGGCAAAGATGGAGAA′] |
| 4090 | NM_000495.4(COL4A5): c.1340 − | 1287 | COL4A5 | [′TTGCTATCCTTTCTTTATCTTACTCRGGTGA |
| | 2A > G | | | TGAGATATGTGAACCAGGCC′] |
| 4091 | NM_000495.4(COL4A5): c.2042 − | 1287 | COL4A5 | [′TTCTTTGAACGTTTTCCTTTCAATARCTGCT |
| | 18A > G | | | GTTTCTCCATAGGTGACCCT′] |
| 4092 | NM_000495.4(COL4A5): c.2147 − | 1287 | COL4A5 | [′GTTAAAAAATGACTTATCATTTTACRGGCT |
| | 2A > G | | | TTCCTGGAATTCCAGGACCTC′] |
| 4093 | NM_000495.4(COL4A5): c.2394A > | 1287 | COL4A5 | [′GCTTAGATGGGCTCCCTGGACCAAARGGT |
| | G (p.Lys798=) | | | ATGGAGGCTGTCACTGCATCTC] |
| 4094 | NM_000495.4(COL4A5): c.2510 − | 1287 | COL4A5 | [′CAGATACATCTTTTAAAACTGCTTCRGTAC |
| | 33A > G | | | TTATTAATATTGATATTGTAT′] |
| 4095 | NM_000495.4(COL4A5): c.2692A > | 1287 | COL4A5 | [′ATTCTTCAAAGGTACCAAAGGTGAARTGG |
| | G (p.Met898Val) | | | GTATGATGGGACCTCCAGGCCC′] |
| 4096 | NM_000495.4(COL4A5): c.2746A > | 1287 | COL4A5 | [′AGGACCTTTGGGAATTCCTGGCAGGRGTG |
| | G (p.Ser916Gly) | | | GTGTACCTGGTCTTAAAGGTAA′] |
| 4097 | NM_000495.4(COL4A5): c.3107 − | 1287 | COL4A5 | [′ATATTATATATCACATATTTTCAACRGGGC |
| | 2A > G | | | CTCAGGGTGTGGAAGGGCCTC′] |
| 4098 | NM_000495.4(COL4A5): c.3455 − | 1287 | COL4A5 | [′AACTGGGTGTAACCTGCTGTACTCARTTTT |
| | 9A > G | | | TTAGGTGGTGGAGGTCATCCT′] |
| 4099 | NM_000495.4(COL4A5): c.3605 − | 1287 | COL4A5 | [′TCTTCTAATTATACTTTACTTTCATRGGCCA |
| | 2A > G | | | AAAGGGTGATGGAGGATTAC′] |
| 4100 | NM_000495.4(COL4A5): c.3925 − | 1287 | COL4A5 | [′GTAACATTAATGATTTTATTTATTCRGGGT |
| | 2A > G | | | AATCCTGGCCGGCCGGGTCTC′] |
| 4101 | NM_000495.4(COL4A5): c.3998 − | 1287 | COL4A5 | [′ATAAAACTGTATGTACCTTCTGTGCDGGCA |
| | 2A > G | | | TGAAAGGACCCAGTGGAGTAC′] |
| 4102 | NM_000495.4(COL4A5): c.4790A > | 1287 | COL4A5 | [′GGATGGGATTCTCTGTGGATTGGTTRTTCC |
| | G (p.Tyr1597Cys) | | | TTCATGATGGTATTTTACACT′] |
| 4103 | NM_000495.4(COL4A5): c.4977 − | 1287 | COL4A5 | [′CTGATTGTCTTATTTCTTATTTCCCRGTAAA |
| | 2A > G | | | CCTCAGTCAGAAACGCTGAA′] |
| 4104 | NM_005359.5(SMAD4): c.425 − | 4089 | SMAD4 | [′TTTCATTTGTTTTCCCCTTTAAACARTTAAG |
| | 6A > G | | | ATCTCTCAGGATTAACACTG′] |
| 4105 | NM_005359.5(SMAD4): c.989A > G | 4089 | SMAD4 | [′TATTGGTGTTCCATTGCTTACTTTGRAATG |
| | (p.Glu330Gly) | | | GATGTTCAGGTAGGAGAGACA′] |
| 4106 | NM_020630.4(RET): c.1996A > G | 5979 | RET | [′CCACTGCTACCACAAGTTTGCCCACVAGCC |
| | (p.Lys666Glu) | | | ACCCATCTCCTCAGCTGAGAT′] |
| 4107 | NM_020630.4(RET): c.2342A > G | 5979 | RET | [′CTGTCAGAGTTCAACGTCCTGAAGCRGGTC |
| | (p.Gln781Arg) | | | AACCACCCACATGTCATCAAA′] |
| 4108 | NM_000060.3(BTD): c.194A > G | 686 | BTD | [′TATTATGTGGCTGCCGTGTATGAGCRTCCA |
| | (p.His65Arg) | | | TCCATCCTGAGTCTGAACCCT′] |
| 4109 | NM_000060.3(BTD): c.278A > G | 686 | BTD | [′CTCATGAACCAGAACCTTGACATCTRTGAA |
| | (p.Tyr93Cys) | | | CAGCAAGTGATGACTGCAGCC′] |
| 4110 | NM_000060.3(BTD): c.356A > G | 686 | BTD | [′CCAGAAGATGGCATTCATGGATTCARCTTT |
| | (p.Asn119Ser) | | | ACAAGAACATCCATTTATCCA′] |
| 4111 | NM_000060.3(BTD): c.364A > G | 686 | BTD | [′TGGCATTCATGGATTCAACTTTACARGAAC |
| | (p.Arg122Gly) | | | ATCCATTTATCCATTTTTGGA′] |
| 4112 | NM_000060.3(BTD): c.515A > G | 686 | BTD | [′AGGGGAGATATGTTCTTGGTGGCCARTCTT |
| | (p.Asn172Ser) | | | GGGACAAAGGAGCCTTGTCAT′] |
| 4113 | NM_000060.3(BTD): c.583A > G | 686 | BTD | [′CCCAAAAGATGGGAGATACCAGTTCRACA |
| | (p.Asn195Asp) | | | CAAATGTCGTGTTCAGCAATAA′] |
| 4114 | NM_000060.3(BTD): c.584A > G | 686 | BTD | [′CCAAAAGATGGGAGATACCAGTTCARCAC |
| | (p.Asn195Ser) | | | AAATGTCGTGTTCAGCAATAAT′] |
| 4115 | NM_000060.3(BTD): c.641A > G | 686 | BTD | [′CTTGTTGACCGCTACCGTAAACACARCCTC |
| | (p.Asn214Ser) | | | TACTTTGAGGCAGCATTCGAT′] |
| 4116 | NM_000060.3(BTD): c.880A > G | 686 | BTD | [′GAAAGCTTTTGCTGTTGCCTTTGGCRTCAA |
| | (p.Ile294Val) | | | CGTTCTGGCAGCTAATGTCCA′] |
| 4117 | NM_000060.3(BTD): c.1205A > G | 686 | BTD | [′TTTCACTCTGAGATGATGTATGACARTTTC |
| | (p.Asn402Ser) | | | ACCCTGGTCCCTGTCTGGGGA′] |
| 4118 | NM_000060.3(BTD): c.1313A > G | 686 | BTD | [′AGGCCCACCTTATCCAAAGAGCTGTRTGCC |
| | (p.Tyr438Cys) | | | CTGGGGGTCTTTGATGGGCTT′] |
| 4119 | NM_000060.3(BTD): c.1619A > G | 686 | BTD | [′ACGGCGGCTCTCTATGGGCGCTTGTRTGAG |
| | (p.Tyr540Cys) | | | AGGGACTAGGAAAAGTGTGTG] |
| 4120 | NM_000155.3(GALT): c.1A > G | 2592 | GALT | [′TTCCAGCGGATCCCCCGGTGGCCTCRTGTC |
| | (p.Met1Val) | | | GCGCAGTGGAACCGATCCTCA′] |
| 4121 | NM_000155.3(GALT): c.67A > G | 2592 | GALT | [′GTCAGAGGCGGACGCCGCAGCAGCARCCT |
| | (p.Thr23Ala) | | | TCCGGGCAAACGGTAACTGCAC′] |
| 4122 | NM_000155.3(GALT): c.253 − 2A > G | 2592 | GALT | [′GTGCTTCTAGCCTATCCTTGTCGGTRGGTG |
| | | | | AATCCCCAGTACGATAGCACC′] |
| 4123 | NM_000155.3(GALT): c.290A > G | 2592 | GALT | [′TACGATAGCACCTTCCTGTTTGACARCGAC |
| | (p.Asn97Ser) | | | TTCCCAGCTCTGCAGCCTGAT′] |
| 4124 | NM_000155.3(GALT): c.308A > G | 2592 | GALT | [′TTTGACAACGACTTCCCAGCTCTGCRGCCT |
| | (p.Gln103Arg) | | | GATGCCCCCAGTCCAGGTAAC′] |
| 4125 | NM_000155.3(GALT): c.379A > G | 2592 | GALT | [′ATCTTTTCTCCCGTCACCACCCAGTRAGGT |
| | (p.Lys127Glu) | | | CATGTGCTTCCACCCCTGGTC′] |
| 4126 | NM_000155.3(GALT): c.424A > G | 2592 | GALT | [′CTGGTCGGATGTAACGCTGCCACTCRTGTC |
| | (p.Met142Val) | | | GGTCCCTGAGATCCGGGCTGT′] |
| 4127 | NM_000155.3(GALT): c.565 − 2A > G | 2592 | GALT | [′TTCTTCTCTGCTTTTGCCCCTTGACRGGTAT |
| | | | | GGGCCAGCAGTTTCCTGCCA′] |
| 4128 | NM_000155.3(GALT): c.574A > G | 2592 | GALT | [′TTTTGCCCCTTGACAGGTATGGGCCRGCAG |
| | (p.Ser192Gly) | | | TTTCCTGCCAGATATTGCCCA′] |
| 4129 | NM_000155.3(GALT): c.626A > G | 2592 | GALT | [′CGTGAGGAGCGATCTCAGCAGGCCTVTAA |
| | (p.Tyr209Cys) | | | GAGTCAGCATGGAGAGCCCCTG′] |
| 4130 | NM_000155.3(GALT): c.752A > G | 2592 | GALT | [′GTCCCCTTCTGGGCAACATGGCCCTVCCAG |
| | (p.Tyr251Cys) | | | ACACTGCTGCTGCCCGTCGGC′] |
| 4131 | NM_000155.3(GALT): c.812A > G | 2592 | GALT | [′CGGCTACCTGAGCTGACCCCTGCTGRGCGT |
| | (p.Glu271Gly) | | | GATGGTCAGTCTCCCAAGTAG′] |
| 4132 | NM_000155.3(GALT): c.821 − 2A > G | 2592 | GALT | [′AGGCTGAGAGTCAGGCTCTGATTCCRGAT |
| | | | | CTAGCCTCCATCATGAAGAAGC′] |
| 4133 | NM_000155.3(GALT): c.854A > G | 2592 | GALT | [′TCCATCATGAAGAAGCTCTTGACCARGTAT |
| | (p.Lys285Arg) | | | GACAACCTCTTTGAGACGTCC′] |
| 4134 | NM_000155.3(GALT): c.968A > G | 2592 | GALT | [′CATTGGCAGCTGCACGCTCATTACTRCCCT |
| | (p.Tyr323Cys) | | | CCGCTCCTGCGCTCTGCCACT′] |
| 4135 | NM_000155.3(GALT): c.1001A > G | 2592 | GALT | [′CTCCTGCGCTCTGCCACTGTCCGGARATTC |
| | (p.Lys334Arg) | | | ATGGTTGGCTACGAAATGCTT′] |
| 4136 | NM_000155.3(GALT): c.1048A > G | 2592 | GALT | [′GCTTGCTCAGGCTCAGAGGGACCTCRCCCC |
| | (p.Thr350Ala) | | | TGAGCAGGTCAGGACTCAGAA′] |
| 4137 | NM_000155.3(GALT): c.1132A > G | 2592 | GALT | [′GCAGAAGGACAGGGAGACAGCAACCRTCG |
| | (p.Ile378Val) | | | CCTGACCACGCCGACCACAGGG′] |
| 4138 | NM_000553.4(WRN): c.403A > G | 7486 | WRN | [′GTTGCTTGAAAATAAAGCAGTTAAARAGG |
| | (p.Lys135Glu) | | | CAGGTGTAGGAATTGAAGGAGA′] |
| 4139 | NM_000433.3(NCF2): c.481A > G | 4688 | NCF2 | [′CTTACCCAGACACACTCCATCGCCTYGTCG |
| | (p.Lys161Glu) | | | ATTTTGGAATGTCTGGGCTCA′] |
| 4140 | NM_198056.2(SCN5A): c.1673A > G | 6331 | SCN5A | [′ACAGCGGGGGAGAGCGAGAGCCACCRCAC |
| | (p.His558Arg) | | | ATCACTGCTGGTGCCCTGGCCC′] |
| 4141 | NM_000074.2(CD40LG): c.386A > | 959 | CD40LG | [′CAAATTGCGGCACATGTCATAAGTGRGGC |
| | G (p.Glu129Gly) | | | CAGCAGTAAAACAACATCTGGT′] |
| 4142 | NM_002863.4(PYGL): c.1016A > G | 5836 | PYGL | [′CCCACCCAGGTGGCCATCCAGCTGARTGA |
| | (p.Asn339Ser) | | | CACTCACCCTGCACTCGCGATC′] |
| 4143 | NM_000142.4(FGFR3): c.1454A > G | 2261 | FGFR3 | [′CCCCTTGGGGAGGGCTGCTTCGGCCRGGT |
| | (p.Gln485Arg) | | | GGTCATGGCGGAGGCCATCGGC′] |
| 4144 | NM_001101.3(ACTB): c.34A > G | 60 | ACTB | [′TGATATCGCCGCGCTCGTCGTCGACVACG |
| | (p.Asn12Asp) | | | GCTCCGGCATGTGCAAGGCCGG′] |
| 4145 | NM_001202.3(BMP4): c.362A > G | 652 | BMP4 | [′TGGGGGAAGAGACTGACCTTCGTGGYGGA |
| | (p.His121Arg) | | | AGCTCCTCACGGTGTTGGCCCG′] |
| 4146 | NM_000094.3(COL7A1): c.425A > | 1294 | COL7A1 | [′CAGCTGGCCCGACCTGGTGTCCCCARGGT |
| | G (p.Lys142Arg) | | | GATCCCTACCCCTACCATGCCT′] |
| | NM_001130823.1(DNMT1): c.1532A > | 1786 | DNMT1 | [] |
| | G (p.Tyr511Cys) | | | |
| 4147 | NM_000138.4(FBN1): c.5096A > G | 2200 | FBN1 | [′AGAAGAAGTTTGTGCTACAGAAACTRCTA |
| | (p.Tyr1699Cys) | | | TGCTGACAACCAGACCTGTGAT] |
| 4148 | NM_000138.4(FBN1): c.5087A > G | 2200 | FBN1 | [′CTAGATATGAGAAGAAGTTTGTGCTRCAG |
| | (p.Tyr1696Cys) | | | AAACTACTATGCTGACAACCAG′] |
| 4149 | NM_000138.4(FBN1): c.5099A > G | 2200 | FBN1 | [′AGAAGTTTGTGCTACAGAAACTACTRTGCT |
| | (p.Tyr1700Cys) | | | GACAACCAGACCTGTGATGGA′] |
| 4150 | NM_001244710.1(GFPT1): c.43A > | 2673 | GFPT1 | [′TTACTTAAACTACCATGTTCCTCGARCGAG |
| | G (p.Thrl5Ala) | | | ACGAGAAATCCTGGAGACCCT′] |
| 4151 | NM_002292.3(LAMB2): c.440A > G | 3913 | LAMB2 | [′CTGGAGGCTGAGTTTCATTTCACACRCCTC |
| | (p.His147Arg) | | | ATTATGACCTTCAAGGTGCCT′] |
| 4152 | NM_005211.3(CSF1R): c.1754 − | 1436 | CSF1R | [′GACTTAAGGGACCTGTGTGCGTGGCRGGT |
| | 2A > G | | | AAGACCCTCGGAGCTGGAGCCT′] |
| 4153 | NM_005247.2(FGF3): c.146A > G | 2248 | FGF3 | [′GGGGCGCCCCGGCGCCGCAAGCTCTRCTG |
| | (p.Tyr49Cys) | | | CGCCACGAAGTACCACCTCCAG′] |
| 4154 | NM_005247.2(FGF3): c.317A > G | 2248 | FGF3 | [′GCCATGAACAAGAGGGGACGACTCTRTGC |
| | (p.Tyr106Cys) | | | TTCGGTGAGTCCAGGCTGTCAC′] |
| 4155 | NM_005188.3(CBL): c.1112A > G | 867 | CBL | [′TAATCAAAGGAACAATATGAATTATRCTG |
| | (p.Tyr371Cys) | | | TGAGATGGGCTCCACATTCCAA′] |
| 4156 | NM_000313.3(PROS1): c.701A > G | 5627 | PROS1 | [′TGTGAATGCCCCGAAGGCTACAGATRTAA |
| | (p.Tyr234Cys) | | | TCTCAAATCAAAGTCTTGTGAA′] |
| 4157 | NM_000329.2(RPE65): c.1292A > G | 6121 | RPE65 | [′TACCAGAAGTATTGTGGGAAACCTTRCAC |
| | (p.Tyr431Cys) | | | ATATGCGTATGGACTTGGCTTG′] |
| 4158 | NM_001040142.1(SCN2A): c.4419A > | 6326 | SCN2A | [′TGAATCTTTTCATTGGTGTCATCATRGATA |
| | G (p.Ile1473Met) | | | ACTTCAACCAACAGAAAAAGA′] |
| 4159 | NM_001040142.1(SCN2A): c.754A > | 6326 | SCN2A | [′GTCAGTGAAGAAGCTTTCTGATGTCRTGAT |
| | G (p.Met252Val) | | | CTTGACTGTGTTCTGTCTAAG′] |
| 4160 | NM_004612.3(TGFBR1): c.134A > | 7046 | TGFBR1 | [′TTCTGCCACCTCTGTACAAAAGACARTTTT |
| | G (p.Asn45Ser) | | | ACTTGTGTGACAGATGGGCTC′] |
| 4161 | NM_003688.3(CASK): c.2168A > G | 8573 | CASK | [′TTTGATCAATTAGATCTTGTCACATRTGAA |
| | (p.Tyr723Cys) | | | GAAGTAGTAAAACTGCCAGCA′] |
| 4162 | NM_015884.3(MBTPS2): c.1523A > | 51360 | MBTPS2 | [′GGTGGCAGTGTACTTTTGGCTGCCARTGTG |
| | G (p.Asn508Ser) | | | ACCCTGGGACTCTGGATGGTT′] |
| 4163 | m.10450A > G | 4573 | MT-TR | [′ACGAATGATTTCGACTCATTAAATTRTGAT |
| | | | | AATCATATTTACCAAATGCCC′] |
| 4164 | m.5816A > G | 4511 | MT-TC | [′GAATTTGCAATTCAATATGAAAATCRCCTC |
| | | | | GGAGCTGGTAAAAAGAGGCCT′] |
| 4165 | m.608A > G | 4558 | MT-TF | [′GTAGCTTACCTCCTCAAAGCAATACRCTGA |
| | | | | AAATGTTTAGACGGGCTCACA′] |
| 4166 | NM_172337.2(OTX2): c.674A > G | 5015 | OTX2 | [′CTGATTGAGATGGCTGGTGACTGCAYTGG |
| | (p.Asn225Ser) | | | TACCCATGGGACTGAGTGTGGC′] |
| 4167 | NM_001376.4(DYNC1H1): c.917A > | 1778 | DYNC1H1 | [′CTCCTGACTCTGGATATCTTGAAACRTGGC |
| | G (p.His306Arg) | | | AAGCGCTTCCATGCCACCGTC′] |
| 4168 | NM_001376.4(DYNC1H1): c.2011A > | 1778 | DYNC1H1 | [′GAAGCGGGTGGAAGATGTCCTTGGCRAGG |
| | G (p.Lys671Glu) | | | GCTGGGAGAATCACGTGGAGGG′] |
| 4169 | NM_001376.4(DYNC1H1): c.2909A > | 1778 | DYNC1H1 | [′CTAAGAATAACCAATCAGGTAATCTRCTTG |
| | G (p.Tyr970Cys) | | | AATCCACCAATTGAAGAGTGC′] |
| 4170 | NM_004380.2(CREBBP): c.2728A > | 1387 | CREBBP | [′ACTGTAGGGGTGCTCTGGGTTTGGGHAGC |
| | G (p.Thr910Ala) | | | ACTGGGCACTGAGCCAGGAGTC′] |
| 4171 | NM_000459.4(TEK): c.2690A > G | 7010 | TEK | [′ATGCTCTCTTCCTTCCCTCCAGGCTVCTTGT |
| | (p.Tyr897Cys) | | | ACCTGGCCATTGAGTACGCG] |
| 4172 | NM_001354.5(AKR1C2): c.235A > | 1646 | AKR1C2 | [′AGATGGCAGTGTGAAGAGAGAAGACRTAT |
| | G (p.Ile79Val) | | | TCTACACTTCAAAGGTACTGTG′] |
| 4173 | NM_007315.3(STAT1): c.604A > G | 6772 | STAT1 | [′ACAAGAACAGCTGTTACTCAAGAAGRTGT |
| | (p.Met202Val) | | | ATTTAATGCTTGACAATAAGAG′] |
| 4174 | NM_007315.3(STAT1): c.494A > G | 6772 | STAT1 | [′GAGCATGAAATCAAGAGCCTGGAAGRTTT |
| | (p.Asp165Gly) | | | ACAAGATGAATATGACTTCAAA′] |
| 4175 | NM_007315.3(STAT1): c.862A > G | 6772 | STAT1 | [′GTTGGAGGAATTGGAACAGAAATACRCCT |
| | (p.Thr288Ala) | | | ACGAACATGACCCTATCACAAA′] |
| 4176 | NM_002052.4(GATA4): c.928A > G | 2626 | GATA4 | [′CCTCCAGGTCCCCAGGCCTCTTGCARTGCG |
| | (p.Met310Val) | | | GAAAGAGGGGATCCAAACCAG′] |
| 4177 | NM_014191.3(SCN8A): c.5302A > G | 6334 | SCN8A | [′CATGTACATTGCCATCATCCTGGAGRACTT |
| | (p.Asn1768Asp) | | | CAGTGTAGCCACAGAGGAAAG′] |
| 4178 | NM_000209.3(PDX1): c.533A > G | 3651 | PDX1 | [′TACATCTCACGGCCGCGCCGGGTGGRGCT |
| | (p.Glu178Gly) | | | GGCTGTCATGTTGAACTTGACC′] |
| 4179 | NM_000890.3(KCNJ5): c.472A > G | 3762 | KCNJ5 | [′CATTGGGTATGGCTTCCGAGTCATCRCAGA |
| | (p.Thr158Ala) | | | GAAGTGTCCAGAGGGGATTAT′] |
| 4180 | NM_000256.3(MYBPC3): c.2234A | 4607 | MYBPC3 | [′ACGGTCGAGGGGGCAGAGAAGGAAGRTG |
| | > G (p.Asp745Gly) | | | AGGGCGTCTACACGGTCACAGTG′] |
| 4181 | NM_005359.5(SMAD4): c.1498A > | 4089 | SMAD4 | [′TGTTGATGACCTTCGTCGCTTATGCRTACT |
| | G (p.Ile500Val) | | | CAGGATGAGTTTTGTGAAAGG′] |
| 4182 | NM_005359.5(SMAD4): c.1500A > | 4089 | SMAD4 | [′TTGATGACCTTCGTCGCTTATGCATRCTCA |
| | G (p.Ile500Met) | | | GGATGAGTTTTGTGAAAGGCT′] |
| 4183 | NM_001184.3(ATR): c.6431A > G | 545 | ATR | [′TATCAATTTTTGACTGCTTTTTCACRATTGA |
| | (p.Gln2144Arg) | | | TCTCTCGAATTTGTCATTCT′] |
| 4184 | NM_153427.2(PITX2): c.262A > G | 5308 | PITX2 | [′CCCCAACCGCCCCCAGGTTTGGTTCRAGAA |
| | (p.Lys88Glu) | | | TCGTCGGGCCAAATGGAGAAA′] |
| 4185 | NM_005257.5(GATA6): c.1354A > | 2627 | GATA6 | [′CTGTGCCAACTGTCACACCACAACTRCCAC |
| | G (p.Thr452Ala) | | | CTTATGGCGCAGAAACGCCGA′] |
| 4186 | NM_005257.5(GATA6): c.1396A > | 2627 | GATA6 | [′AAACGCCGAGGGTGAACCCGTGTGCVATG |
| | G (p.Asn466Asp) | | | CTTGTGGACTCTACATGAAACT′] |
| 4187 | NM_000414.3(HSD17B4): c.650A > | 3295 | HSD17B4 | [′CTTGTGGAAGCCCTGAAGCCAGAGTRTGT |
| | G (p.Tyr217Cys) | | | GGCACCTCTTGTCCTTTGGCTT′] |
| 4188 | NM_004153.3(ORC1): c.380A > G | 4998 | ORC1 | [′GCCTGTGACAGCAACATTAATGCGGRGAC |
| | (p.Glu127Gly) | | | CATCATTGGCCTTGTTCGGGTA′] |
| 4189 | NM_002552.4(ORC4): c.521A > G | 5000 | ORC4 | [′CATCATAAAAACCAAACACTTCTCTRTAAT |
| | (p.Tyr174Cys) | | | CTTTTTGACATTTCTCAGTCT′] |
| 4190 | NM_004656.3(BAP1): c.2057 − | 8314 | BAP1 | [′GCTCCACTAGGTTGGCCAGCATGCCYGCG |
| | 2A > G | | | AAGAGGTAGAGACCCTTGAGCA′] |
| 4191 | NM_004656.3(BAP1): c.438 − 2A > G | 8314 | BAP1 | [′TCAGGGAGGTGGCGTGGCTCGGGCCYGGG |
| | | | | GAAAAACAGAGTCAGGGCCCAA′] |
| | NM_003590.4(CUL3): c.1238A > G | 8452 | CUL3 | [] |
| | (p.Asp413Gly) | | | |
| 4192 | NM_004813.2(PEX16): c.992A > G | 9409 | PEX16 | [′TACTTGCCCACCTGGCAGAAAATCTRCTTC |
| | (p.Tyr331Cys) | | | TACAGTTGGGGCTGACAGACC′] |
| 4193 | NM_004544.3(NDUFA10): c.1A > G | 4705 | NDUFA10 | [′TTGATCCTGAGCTGACCGGGTAGCCRTGGC |
| | (p.Met1Val) | | | CTTGCGGCTCCTGAAGCTGGC′] |
| 4194 | NM_004544.3(NDUFA10): c.425A > | 4705 | NDUFA10 | [′TGGTTGTACAGCAGTCGCCTGCTGCRGTAC |
| | G (p.Gln142Arg) | | | TCAGATGCCTTGGAGCACTTG′] |
| 4195 | NM_006796.2(AFG3L2): c.1996A > | 10939 | AFG3L2 | [′TATTTTTCAGATTGTTCAGTTTGGCDTGAA |
| | G (p.Met666Val) | | | TGAAAAGGTTGGGCAAATCTC′] |
| 4196 | NM_006796.2(AFG3L2): c.1847A > | 10939 | AFG3L2 | [′TATTTACCAAAAGAACAATACCTCTRTACC |
| | G (p.Tyr616Cys) | | | AAAGAGCAGCTCTTGGATAGG′] |
| 4197 | NM_001199397.1(NEK1): c.869 − | 4750 | NEK1 | [′CAAAATTCTTTGTATCTTTTCATCTRGCTA |
| | 2A > G | | | AAAGACCAGCTTCAGGACAAA′] |
| 4198 | NM_006587.3(CORIN): c.949A > G | 10699 | CORIN | [′GAATCTGTTTCACTGTCACACAGGCRAGTG |
| | (p.Lys317Glu) | | | CCTTAATTACAGCCTTGTGTG′] |
| 4199 | NM_006587.3(CORIN): c.1414A > G | 10699 | CORIN | [′CATGAATTTGCCCTACAACAGTACARGTTA |
| | (p.Ser472Gly) | | | TCCAAATTATTTTGGCCACAG′] |
| 4200 | NM_015560.2(OPA1): c.1294A > G | 4976 | OPA1 | [′AGCTTACATGCAGAATCCTAATGCCRTCAT |
| | (p.Ile432Val) | | | ACTGTGTATTCAAGGTAAATC′] |
| 4201 | NM_021625.4(TRPV4): c.1805A > G | 59341 | TRPV4 | [′CGTGGGCTGAAGCTGACGGGGACCTRTAG |
| | (p.Tyr602Cys) | | | CATCATGATCCAGAAGGTACGG′] |
| 4202 | NM_021625.4(TRPV4): c.590A > G | 59341 | TRPV4 | [′TCTACGGGGAAGACCTGCCTGCCCARGGC |
| | (p.Lys197Arg) | | | CTTGCTGAACCTGAGCAATGGC′] |
| 4203 | NM_021625.4(TRPV4): c.826A > G | 59341 | TRPV4 | [′GGCCCGTGGGCGCTTCTTCCAGCCCRAGG |
| | (p.Lys276Glu) | | | ATGAGGGGGGCTACTTCTACTT′] |
| 4204 | NM_024022.2(TMPRSS3): c.308A > | 64699 | TMPRSS3 | [′GTCTCGGATTGCAAAGACGGGGAGGRCGA |
| | G (p.Asp103Gly) | | | GTACCGCTGTGGTAAGGTCATG′] |
| 4205 | NM_016599.4(MYOZ2): c.738A > G | 51778 | MYOZ2 | [′GATGGATATCTGAGAATATTCCTATRGTGA |
| | (p.Ile246Met) | | | TAACAACCGAACCTACAGATG′] |
| | NM_017415.2(KLHL3): c.1670A > G | 26249 | KLHL3 | [] |
| | (p.Tyr557Cys) | | | |
| 4206 | NM_019109.4(ALG1): c.1129A > G | 56052 | ALG1 | [′GTCCTCCAGTGGCCTGGACCTGCCCRTGAA |
| | (p.Met377Val) | | | GGTGGTGGACATGTTCGGGTG′] |
| 4207 | NM_031885.3(BBS2): c.472 − 2A > G | 583 | BBS2 | [′GCTAATGGTTTGGGGTTTTATTTTCRGGTT |
| | | | | ACTGGAGACAATGTTAATTCC′] |
| 4208 | NM_006886.3(ATP5E): c.35A > G | −1 | — | [′TACCTTCTCTCATTTTCTCCCAGCTRCATCC |
| | (p.Tyr12Cys) | | | GATACTCCCAGATCTGTGCA′] |
| 4209 | NM_022445.3(TPK1): c.656A > G | 27010 | TPK1 | [′CACAACACCAGACCCGTCGTAGGTAYTGG |
| | (p.Asn219Ser) | | | AAGTACTGACCAATGTTCCAAA′] |
| 4210 | NM_000017.3(ACADS): c.1031A > | 35 | ACADS | [′CTCTGACTGTACCCCCATGTTTAGGRGGCA |
| | G (p.Glu344Gly) | | | GCCATGGCCAAGCTGGCCGCC′] |
| 4211 | NM_016013.3(NDUFAF1): c.758A > | 51103 | NDUFAF1 | [′GGGGGACCCTACTGGCAGGAGGTCARGGT |
| | G (p.Lys253Arg) | | | AACAGCATAAATCTTCATTGTT′] |
| 4212 | NM_032580.3(HES7): c.172A > G | 84667 | HES7 | [′GAACCCGAAGCTGGAGAAAGCGGAGRTAT |
| | (p.Ile58Val) | | | TGGAGTTCGCCGTGGGCTACTT′] |
| 4213 | NM_024887.3(DHDDS): c.124A > G | 79947 | DHDDS | [′GGACGGGAACCGTCGCTATGCCAAGRAGT |
| | (p.Lys42Glu) | | | GCCAGGTGGAGCGGCAGGAAGG′] |
| 4214 | NM_024700.3(SNEP1): c.1097A > G | 79753 | SNIP1 | [′CTCAAATTTGGATTCAGTAGCAGAGRATA |
| | (p.Glu366Gly) | | | CGTCTTGCTCCATGAGTCGTCG′] |
| 4215 | NM_206933.2(USH2A): c.7595 − | 7399 | USH2A | [′AATTGAACACCTCTCCTTTCCCAAGRTAAG |
| | 2144A > G | | | AGATCATCTTTAAGAAAAGGC′] |
| 4216 | NM_016952.4(CDON): c.2368A > G | 50937 | CDON | [′GTTTTTGTTTTCCCTCAAAGGTTCARCATA |
| | (p.Thr790Ala) | | | CAAATTTAGGGTCATTGCCAT′] |
| 4217 | NM_020435.3(GJC2): c.-167A > G | 57165 | GJC2 | [′AGACCCTGAGGCCGAGGGGGGAACARTGG |
| | | | | GGCCCTTGAGGGCCCCTCCTCC′] |
| 4218 | NM_024549.5(TCTN1): c.221 − | 79600 | TCTN1 | [′TGGATCCTACCCCTCTTTTTTCTGCRGTTGC |
| | 2A > G | | | TGTTCTCTGTGTCTGTGACT′] |
| 4219 | NM_031427.3(DNAL1): c.449A > G | 83544 | DNAL1 | [′CTCGAAGACCTGGTGTTTGTAGGCARTCCC |
| | (p.Asn150Ser) | | | TTGGAAGAGAAACATTCTGCT′] |
| 4220 | NM_145046.4(CALR3): c.245A > G | 125972 | CALR3 | [′AGTTTTCCCTTTATTGCTGAACGGTYTGAA |
| | (p.Lys82Arg) | | | GCGTGCAGAGATGGCATAGAA′] |
| 4221 | NM_020320.3(RARS2): c.1024A > G | 57038 | RARS2 | [′AATGGACAAGTATAATTTTGATACARTGAT |
| | (p.Met342Val) | | | ATATGTGGTAAGTAATCAGAA′] |
| 4222 | NM_020320.3(RARS2): c.35A > G | 57038 | RARS2 | [′CTCTGCGCGCTCCGGGATCCATACCYGGC |
| | (p.Gln12Arg) | | | AAGCAATAGCGCGGCGAAAGCC′] |
| 4223 | NM_001017361.2(KHDC3L): c.1A > | 154288 | KHDC3L | [′TGTCTCCTGCAGGACCGGCCGCAGCRTGG |
| | G (p.MetlVal) | | | ACGCTCCCAGGCGGTTTCCGAC′] |
| 4224 | NM_024753.4(TTC21B): c.2758 − | 79809 | TTC21B | [′TAATCGTGCCAGTTCCAACATAATCYGTAG |
| | 2A > G | | | AGCAAAGGGCTAGATTCATCA′] |
| 4225 | NM_001145901.1(SARS2): c.1175A > | 54938 | SARS2 | [′TTCGTCCTTGACCGCAGGGTCCTGGRTATG |
| | G (p.Asp392Gly) | | | CCCACCCAAGAACTGGGCCTC′] |
| 4226 | NM_000552.3(VWF): c.3437A > G | 7450 | VWF | [′AACGGGTATGAGTGTGAGTGGCGCTRTAA |
| | (p.Tyr1146Cys) | | | CAGCTGTGCACCTGCCTGTCAA′] |
| 4227 | NM_014985.3(CEP152): c.2000A > | 22995 | CEP152 | [′ACCTTACCTATCCACAGCTTCTTGTYTGTC |
| | G (p.Lys667Arg) | | | ATGGTCAAAATCTTGTACCAT′] |
| 4228 | NM_024809.4(TCTN2): c.1506 − | 79867 | TCTN2 | [′GCTGAGAAATGTCTTACTCTCTTGCRGGGA |
| | 2A > G | | | GAATGCTGTTGAAAGACTTGA′] |
| 4229 | NM_198994.2(TGM6): c.980A > G | 343641 | TGM6 | [′CGGACCCTGGAGGACCTGACAGAAGRCAG |
| | (p.Asp327Gly) | | | CATGTGGTGGGTCCTGCCCCCA′] |
| 4230 | NM_052873.2(IFT43): c.1A > G | 112752 | IFT43 | [′GAAGTGACGTCAGGCGGCCGCGGAGRTGG |
| | (p.Met1Val) | | | AGGATTTGCTCGACTTGGACGA′] |
| 4231 | NM_201269.2(ZNF644): c.2014A > | 84146 | ZNF644 | [′AACATTTGGATCAACCTCACAATCARGTA |
| | G (p.Ser672Gly) | | | GTTTTTCAAAAATTCATAAGCG′] |
| 4232 | NM_201269.2(ZNF644): c.1759A > | 84146 | ZNF644 | [′GTAGTAAAAGGACACATCTTACATAYGTA |
| | G (p.Ile587Val) | | | GGTAGCTGATTTTTTGGATGAT′] |
| 4233 | NM_018699.3(PRDM5): c.320A > G | 11107 | PRDM5 | [′TTTCAGGAAGGAGAAAACATTTTCTRTTTG |
| | (p.Tyr107Cys) | | | GCAGTTGAAGATATAGAAACA′] |
| 4234 | NM_001198799.2(ASCC1): c.953A > | 51008 | ASCC1 | [′CTATAGTTCTCTGGGGGACTTACCAYTGGG |
| | G (p.Asn318Ser) | | | GTCTTTCCTGAATAGTGTATT′] |
| 4235 | NM_007055.3(POLR3A): c.2554A > | 11128 | POLR3A | [′ACCAACTGAGTTTTTCTTCCACACARTGGC |
| | G (p.Met852Val) | | | CGGCCGGGAAGGTCTAGTCGA′] |
| 4236 | NM_001256047.1(C19orf12): c.391A > | 83636 | C19orf12 | [′TACTGGATCTCGGCCCGCAGCTCCTYGGTG |
| | G (p.Lys131Glu) | | | ACGTAGTTCACCAGCATGGCC′] |
| 4237 | NM_016464.4(TMEM138): c.287A > | 51524 | TMEM138 | [′TACTTTGCCCTCAGCATCTCCCTTCRTGTCT |
| | G (p.His96Arg) | | | GGGTCATGGTAAGAGTGGCA′] |
| 4238 | NM_016464.4(TMEM138): c.389A > | 51524 | TMEM138 | [′TTCCTCCCCACAGCAGCAGTGTTGTRCTGC |
| | G (p.Tyr130Cys) | | | TACTTCTATAAACGGACAGCC′] |
| 4239 | NM_177965.3(C8orf37): c.545A > G | 157657 | C8orf37 | [′AAAGGAACACGGGCATATGCCTGCCRGTG |
| | (p.Gln182Arg) | | | TAGCTGGAGAACTATTGAAGAA′] |
| 4240 | NM_001004334.3(GPR179): c.659A > | 440435 | GPR179 | [′CCCAAGTGGCCGCAGGCAGATGGATRTGT |
| | G (p.Tyr220Cys) | | | GGGGGACACGCAGCAGGTGAGG′] |
| 4241 | NM_004963.3(GUCY2C): c.1160A > | 2984 | GUCY2C | [′AGCAGTGAGACATACTTTCTTGGTGYCCAC |
| | G (p.Asp387Gly) | | | AGAGGTATACAGAAGCACCAT′] |
| 4242 | NM_024110.4(CARD14): c.425A > | 79092 | CARD14 | [′AGCCTGCAGGAGGAGCTGAACCAGGRAAA |
| | G (p.Glu142Gly) | | | GGGGCAGAAGGAGGTGCTGCTG′] |
| 4243 | NM_018105.2(THAP1): c.70A > G | 55145 | THAP1 | [′CAAGGACAAGCCCGTTTCTTTCCACRAGTG |
| | (p.Lys24Glu) | | | AGGACCCTGCGCGCCTCGCGG′] |
| 4244 | NM_000933.3(PLCB4): c.1868A > G | 5332 | PLCB4 | [′AACAAACGGCAAATGAGTCGCATTTRCCC |
| | (p.Tyr623Cys) | | | CAAGGGAGGCCGAGTCGATTCC′] |
| 4245 | NM_001172646.1(PLCB4): c.986A > | 5332 | PLCB4 | [′CACTACTTCATCAGTTCTTCCCATAVCACT |
| | G (p.Asn329Ser) | | | TATCTCACTGGCAGACAGTTC′] |
| 4246 | NM_005850.4(SF3B4): c.1A > G | 10262 | SF3B4 | [′GGGAGACGGCGGGATCTCTTTCGCCRTGG |
| | (p.Met1Val) | | | CTGCCGGGCCGATCTCCGAGCG′] |
| 4247 | NM_014714.3(IFT140): c.932A > G | 9742 | IFT140 | [′TGGGACATAGAACGAGGAGAGAATTRTAT |
| | (p.Tyr311Cys) | | | ACTGAGTCCAGATGAGAAGTTT′] |
| 4248 | NM_000258.2(MYL3): c.517A > G | 4634 | MYL3 | [′GACAGAAGACGAAGTGGAGAAGTTGRTGG |
| | (p.Met173Val) | | | CTGGGCAAGAGGACTCCAATGG′] |
| 4249 | NM_032578.3(MYPN): c.59A > G | 84665 | MYPN | [′ATATCTCAGCTTCTAAGAGAGAGCTRTTTA |
| | (p.Tyr20Cys) | | | GCTGAAACCAGACATCGGGGA′] |
| 4250 | NM_001018005.1(TPM1): c.742A > | 7168 | TPM1 | [′TGAGTTTGCGGAGAGGTCAGTAACTRAAT |
| | G (p.Lys248Glu) | | | TGGAGAAAAGCATTGATGACTT′] |
| 4251 | NM_005006.6(NDUFS1): c.1783A > | 4719 | NDUFS1 | [′AGCTGCTTACACAGAGAAGTCTGCTRCAT |
| | G (p.Thr595Ala) | | | ATGTCAACACTGAGGGTAGAGC′] |
| 4252 | NM_033360.3(KRAS): c.439A > G | 3845 | KRAS | [′AATTCCTTTTATTGAAACATCAGCARAGAC |
| | (p.Lys147Glu) | | | AAGACAGGTAAGTAACACTGA′] |
| 4253 | NM_014236.3(GNPAT): c.1556A > | 8443 | GNPAT | [′GAAGATGAACTCATCTGCAAAAACAHCAC |
| | G (p.Asp519Gly) | | | GTAGGAAGCGAAAGCAACTGTA′] |
| 4254 | NM_017565.3(FAM20A): c.813 − | −1 | — | [′GGCACCCGTCGGAAGTCCAGAATCCYGCA |
| | 2A > G | | | AGAGAGGAAGCTCTGTTCCATC′] |
| 4255 | NM_017565.3(FAM20A): c.590 − | 54757 | FAM20A | [′AGGCTTTCTCATCTTGACTGTAATCYGCAA |
| | 2A > G | | | AGGAGGAGAAGGGCAATGAGA′] |
| 4256 | NM_017636.3(TRPM4): c.2741A > | 54795 | TRPM4 | [′CTGCTTCACATCTTCACGGTCAACARACAG |
| | G (p.Lys914Arg) | | | CTGGGGCCCAAGATCGTCATC′] |
| 4257 | NM_000076.2(CDKN1C): c.832A > | 1028 | CDKN1C | [′GCTGTCGCCCGCAGATTTCTTCGCCRAGCG |
| | G (p.Lys278Glu) | | | CAAGAGATCAGCGCCTGAGAA′] |
| 4258 | NM_022912.2(REEP1): c.304 − | 65055 | REEP1 | [′AGTGTGCCTCTGTTTTTCCTTTGACRGGAA |
| | 2A > G | | | ATCGATGATTGTCTGGTCCAA′] |
| 4259 | NM_000053.3(ATP7B): c.2305A > G | 540 | ATP7B | [′TGTGACATTCTTCGACACGCCCCCCRTGCT |
| | (p.Met769Val) | | | CTTTGTGTTCATTGCCCTGGG′] |
| 4260 | NM_000053.3(ATP7B): c.3620A > G | 540 | ATP7B | [′GTCCACACCCATGCTCTGCAGCGTGYGCA |
| | (p.His1207Arg) | | | CAGCCAGGGCAGCCTCCTGCTT′] |
| 4261 | NM_000492.3(CFTR): c.3140 − | 1080 | CFTR | [′ACATTTTGTGTTTATGTTATTTGCARTGTTT |
| | 26A > G | | | TCTATGGAAATATTTCACAG′] |
| 4262 | NM_000570.4(FCGR3B): c.194A > | 2215 | FCGR3B | [′GCTCGAGGCCTGGCTTGAGATGAGGYTCT |
| | G (p.Asn65Ser) | | | CATTGTGAAACCACTGTGTGGA′] |
| 4263 | NM_198253.2(TERT): c.2705A > G | 7015 | TERT | [′TATGGCTGCGTGGTGAACTTGCGGARGAC |
| | (p.Lys902Arg) | | | AGTGGTGAACTTCCCTGTAGAA′] |
| 4264 | NM_005022.3(PFN1): c.350A > G | 5216 | PFN1 | [′GTTGATCAAACCACCGTGGACACCTYCTTT |
| | (p.Glu117Gly) | | | GCCCATCAGCAGGACTAGCGC′] |
| 4265 | NM_005349.3(RBPJ): c.188A > G | 3516 | RBPJ | [′GTTGCACAGAAGTCATATGGAAATGRAAA |
| | (p.Glu63Gly) | | | AAGGTAAGATTATTTTTCTGGT′] |
| 4266 | NM_005349.3(RBPJ): c.505A > G | 3516 | RBPJ | [′GATAAAAGTCATCTCCAAACCTTCCRAAA |
| | (p.Lys169Glu) | | | AGAAGCAGTCATTGAAAAATGC′] |
| 4267 | NM_022787.3(NMNAT1): c.817A > | 64802 | NMNAT1 | [′GGTCATCCTGGCCCCTTTGCAGAGARACAC |
| | G (p.Asn273Asp) | | | TGCAGAAGCTAAGACATAGGA′] |
| 4268 | NM_020921.3(NIN): c.3665A > G | 51199 | NIN | [′CACAGAAACATCAAAAAGTAGGTCCYGTT |
| | (p.Gln1222Arg) | | | TCTTTTCAGAAGCTCGATCACA′] |
| 4269 | NM_020921.3(NIN): c.5126A > G | 51199 | NIN | [′AAAATCTCTAGTGTTCTAAGCTACARCGAA |
| | (p.Asn1709Ser) | | | AAACTGCTGAAAGAAAAGGAA′] |
| 4270 | NM_005340.6(HINT1): c.152A > G | 3094 | HINT1 | [′GACATTTCCCCTCAAGCACCAACACRTTTT |
| | (p.His51Arg) | | | CTGGTGATACCCAAGAAACAT′] |
| 4271 | NM_005050.3(ABCD4): c.956A > G | 5826 | ABCD4 | [′GAGCTGGGTGAAGCAGCTGATGAGGYAGA |
| | (p.Tyr319Cys) | | | TGCACACAAAGGCATTCTGGAC′] |
| 4272 | NM_000155.3(GALT): c.950A > G | 2592 | GALT | [′GCTGGGGCCAACTGGAACCATTGGCRGCT |
| | (p.Gln317Arg) | | | GCACGCTCATTACTACCCTCCG′] |
| 4273 | NM_007294.3(BRCA1): c.213 − | 672 | BRCA1 | [′ACTTGCTGAGTGTGTTTCTCAAACARTTTA |
| | 12A > G | | | ATTTCAGGAGCCTACAAGAAA′] |
| 4274 | NM_007294.3(BRCA1): c.4096 + 3A > | 672 | BRCA1 | [′GCAAAGCATGGATTCAAACTTAGGTRTTG |
| | G | | | GAACCAGGTTTTTGTGTTTGCC′] |
| 4275 | NM_007294.3(BRCA1): c.5194 − | 72 | BRCA1 | [′TGATGGGTTGTGTTTGGTTTCTTTCVGCAT |
| | 2A > G | | | GATTTTGAAGTCAGAGGAGAT′] |
| 4276 | NM_007294.3(BRCA1): c.5453A > | 672 | BRCA1 | [′GTGCAGCCAGATGCCTGGACAGAGGRCAA |
| | G (p.Asp1818Gly) | | | TGGCTTCCATGGTAAGGTGCCT′] |
| 4277 | NM_000059.3(BRCA2): c.1799A > | 675 | BRCA2 | [′TATGCTATACATGATGAAACATCTTRTAAA |
| | G (p.Tyr600Cys) | | | GGAAAAAAAATACCGAAAGAC′] |
| 4278 | NM_000059.3(BRCA2): c.476 − | 675 | BRCA2 | [′ACAATTTTCCCCTTTTTTTACCCCCRGTGGT |
| | 2A > G | | | ATGTGGGAGTTTGTTTCATA′] |
| 4279 | NM_000059.3(BRCA2): c.8168A > | 675 | BRCA2 | [′AAAGTGGCCATTATTGAACTTACAGNTGG |
| | G (p.Asp2723Gly) | | | GTGGTATGCTGTTAAGGCCCAG′] |
| 4280 | NM_000059.3(BRCA2): c.8633 − | 675 | BRCA2 | [′GAATTAATAATCCTTTTGTTTTCTTDGAAA |
| | 2A > G | | | ACACAACAAAACCATATTTAC′] |
| 4281 | NM_000060.3(BTD): c.629A > G | 686 | BTD | [′AATAATGGAACCCTTGTTGACCGCTRCCGT |
| | (p.Tyr210Cys) | | | AAACACAACCTCTACTTTGAG] |
| 4282 | NM_000060.3(BTD): c.968A > G | 686 | BTD | [′ACCCCTCTGGAGTCCTTTTGGTACCRTGAC |
| | (p.His323Arg) | | | ATGGAAAATCCCAAAAGTCAC′] |
| 4283 | NM_000155.3(GALT): c.857A > G | 2592 | GALT | [′ATCATGAAGAAGCTCTTGACCAAGTRTGA |
| | (p.Tyr286Cys) | | | CAACCTCTTTGAGACGTCCTTT′] |
| 4284 | NM_000060.3(BTD): c.128A > G | 686 | BTD | [′TGTTACGTGGTTGCCCTGGGAGCCCRCACC |
| | (p.His43Arg) | | | GGGGAGGAGAGCGTGGCTGAC′] |
| 4285 | NM_002437.4(MPV17): c.262A > G | 4358 | MPV17 | [′CACCACCAAAGTGGATGCACTGAAGRAGA |
| | (p.Lys88Glu) | | | TGTTGTTGGATCAGGTGAGCAG′] |
| 4286 | NM_002769.4(PRSS1): c.65A > G | −1 | — | [′GTTGCTGCCCCCTTTGATGATGATGRCAAG |
| | (p.Asp22Gly) | | | ATCGTTGGGGGCTACAACTGT′] |
| 4287 | NM_005211.3(CSF1R): c.2320 − | 1436 | CSF1R | [′GACTAACCCTGCAGTGCTTTCCCTCRGTGC |
| | 2A > G | | | ATCCACCGGGACGTGGCAGCG′] |
| 4288 | NM_024312.4(GNPTAB): c.118 − | 79158 | GNPTAB | [′GAAAACGTTTCTTTTTCTTTGTTCTRGGTG |
| | 2A > G | | | GTTCTGGAATGGAGCCGAGAT′] |
| 4289 | NM_000495.4(COL4A5): c.3107 − | 1287 | COL4A5 | [′AAATATTATATATCACATATTTTCARCAGG |
| | 4A > G | | | GCCTCAGGGTGTGGAAGGGCC′] |
| 4290 | NM_000282.3(PCCA): c.862A > G | 5095 | PCCA | [′TGGGAATGCTTTATGGCTTAATGAANGAG |
| | (p.Arg288Gly) | | | AGTGCTCAATTCAGAGAAGAAA′] |
| 4291 | NM_000288.3(PEX7): c.854A > G | 5191 | PEX7 | [′TCTCTTCTTGAAACAGTGGAGCATCRTACA |
| | (p.His285Arg) | | | GAGTTTACTTGTGGTTTAGAC′] |
| 4292 | NM_000532.4(PCCB): c.1606A > G | 5096 | PCCB | [′ACAACGTCCTTGGAGAAAACATGCARATA |
| | (p.Asn536Asp) | | | TTCCATTGTAAACAAATCAAAG′] |
| 4293 | NM_000553.4(WRN): c.2089 − | 7486 | WRN | [′TCAAAGGAAAAATACATTTAAGATTVTAA |
| | 3024A > G | | | GTCTGGTTATAAGCTTAAAAAG′] |
| 4294 | NM_001039958.1(MESP2): c.271A > | 145873 | MESP2 | [′GCGGCAGAGCGCCAGCGAGCGGGAGRAA |
| | G (p.Lys91Glu) | | | CTGCGCATGCGCACGCTGGCCCG′] |
| 4295 | NM_001099274.1(TINF2): c.850A > | 26277 | TINF2 | [′TAGGGGAGGCCATAAGGAGCGCCCCRCAG |
| | G (p.Thr284Ala) | | | TCATGCTGTTTCCCTTTAGGAA′] |
| 4296 | NM_001099274.1(TINF2): c.871A > | 26277 | TINF2 | [′CCCCACAGTCATGCTGTTTCCCTTTRGGAA |
| | G (p.Arg291Gly) | | | TCTCGGCTCACCAACCCAGGT′] |
| 4297 | NM_001363.4(DKC1): c.115A > G | 1736 | DKC1 | [′ACAACACGCTGAAGAATTTCTTATCRAACC |
| | (p.Lys39Glu) | | | TGAATCCAAAGTTGCTAAGTT′] |
| 4298 | NM_001363.4(DKC1): c.127A > G | 1736 | DKC1 | [′AGAATTTCTTATCAAACCTGAATCCRAAGT |
| | (p.Lys43Glu) | | | TGCTAAGTTGGACACGTCTCA′] |
| 4299 | NM_001363.4(DKC1): c.196A > G | 1736 | DKC1 | [′GAATTTTGATAAGCTGAATGTAAGGRCAA |
| | (p.Thr66Ala) | | | CACACTATACACCTCTTGCATG′] |
| 4300 | NM_001363.4(DKC1): c.941A > G | 1736 | DKC1 | [′GTAAATGCCATCTGCTATGGGGCCARGATT |
| | (p.Lys314Arg) | | | ATGCTTCCAGGTGTTCTTCGA′] |
| 4301 | NM_004614.4(TK2): c.173A > G | 7084 | TK2 | [′GCATGTCGTCTTCCCACTTGCAATAYTGCC |
| | (p.Asn58Ser) | | | CTCGACACAGATCTGGCAAAA′] |
| 4302 | NM_004614.4(TK2): c.278A > G | 7084 | TK2 | [′AACCAACAACCCACTCACCAGAGGAYTGT |
| | (p.Asn93Ser) | | | GGCCACGGACATTTCTCCACTT′] |
| 4303 | NM_004614.4(TK2): c.562A > G | 7084 | TK2 | [′AGTTTACCTTCGGACCAATCCTGAGRCTTG |
| | (p.Thr188Ala) | | | TTACCAGAGGTTAAAGAAGAG′] |
| 4304 | NM_024312.4(GNPTAB): c.1285 − | 79158 | GNPTAB | [′TTTATTTTCTCTTTGGTTTTATCGTRGGTTT |
| | 2A > G | | | ATTTGACATGGCCTGTGCCA′] |
| 4305 | NM_024312.4(GNPTAB): c.2867A > | 79158 | GNPTAB | [′TTCACATCGCGGAAAGTCCCTGCTCRCATG |
| | G (p.His956Arg) | | | CCTCACATGATTGACCGGATT′] |
| 4306 | NM_024312.4(GNPTAB): c.3458A > | 79158 | GNPTAB | [′AGGAAGTTTGTTTGCCTGAATGACARCATT |
| | G (p.Asn1153Ser) | | | GACCACAATCATAAAGATGCT′] |
| 4307 | NM_024312.4(GNPTAB): c.2783A > | 79158 | GNPTAB | [′AGCAAAAATACTGGGAGGCAACTAARAGA |
| | G (p.Lys928Arg) | | | TACATTTGCAGATTCCCTCAGA′] |
| 4308 | NM_198253.2(TERT): c.2537A > G | 7015 | TERT | [′TCCACGCTGCTCTGCAGCCTGTGCTRCGGC |
| | (p.Tyr846Cys) | | | GACATGGAGAACAAGCTGTTT′] |
| 4309 | NM_198578.3(LRRK2): c.3342A > G | 120892 | LRRK2 | [′TAGAGAAACTGGAGCAGCTCATTTTRGAA |
| | (p.Leu1114=) | | | GGGTAAGAAAGAGCTCATTAAA′] |
| 4310 | NM_198578.3(LRRK2): c.5605A > G | 120892 | LRRK2 | [′TTTGGCTGACCTGCCTAGAAATATTRTGTT |
| | (p.Met1869Val) | | | GAATAATGATGAGTTGGAATT′] |
| 4311 | NM_207352.3(CYP4V2): c.367A > G | 285440 | CYP4V2 | [′TTCAAAGCAAATTGACAAATCCTCTRTGTA |
| | (p.Met123Val) | | | CAAGTTTTTAGAACCATGGCT′] |
| 4312 | NM_207352.3(CYP4V2): c.761A > G | 285440 | CYP4V2 | [′CTTATGTTTAAAGAAGGATGGGAACRCAA |
| | (p.His254Arg) | | | AAAGAGCCTTCAGATCCTACAT′] |
| 4313 | NR_001566.1(TERC): n.37A > G | 7012 | TERC | [′GGTGGGCCTGGGAGGGGTGGTGGCCDTTT |
| | | | | TTTGTCTAACCCTAACTGAGAA′] |
| 4314 | NR_001566.1(TERC): n.48A > G | 7012 | TERC | [′GAGGGGTGGTGGCCATTTTTTGTCTRACCC |
| | | | | TAACTGAGAAGGGCGTAGGCG′] |
| 4315 | NM_007171.3(POMT1): c.430A > G | 10585 | POMT1 | [′CATGTGTTTCCTCTTTGAAACAGAGRATGC |
| | (p.Asn144Asp) | | | TCTCATCACTCAGTCAAGGCT′] |
| 4316 | NM_003863.3(DPM2): c.68A > G | 8818 | DPM2 | [′GCCGTTAGCCTGATCATCTTCACCTRCTAC |
| | (p.Tyr23Cys) | | | ACCGCCTGGGTGATTCTCTTG′] |
| 4317 | NM_000030.2(AGXT): c.1020A > G | 189 | AGXT | [′GGAGAGACATCGTCAGCTACGTCATRGAC |
| | (p.Ile340Met) | | | CACTTCGACATTGAGATCATGG′] |
| 4318 | NM_031418.2(ANO3): c.2053A > G | 63982 | ANO3 | [′TTATGTTCTATTTCAGTGTCATCCTRGTGG |
| | (p.Ser685Gly) | | | CTGTTTGATAGACCTCTGCCT′] |
| 4319 | NM_183075.2(CYP2U1): c.1139A > | 113612 | CYP2U1 | [′CCTTTTTACATAGAAAAGGTTCATGRAGAA |
| | G (p.Glu380Gly) | | | ATTGAAAGAGTCATTGGCGCC′] |
| 4320 | NM_003094.3(SNRPE): c.1A > G | 6635 | SNRPE | [′GGTGTGCTCTTTGTGAAATTCCACCRTGGC |
| | (p.Met1Val) | | | GTACCGTGGCCAGGGTCAGAA′] |
| 4321 | NM_000344.3(SMN1): c.389A > G | 6606 | SMN1 | [′ACCTGTGTTGTGGTTTACACTGGATRTGGA |
| | (p.Tyr130Cys) | | | AATAGAGAGGAGCAAAATCTG] |
| 4322 | NM_012082.3(ZFPM2): c.2209A > G | −1 | — | [′CATGCAGAGAACCATGCGCACACGCRAGC |
| | (p.Lys737Glu) | | | GCAGAAAGATGTATGAGATGTG′] |
| 4323 | NM_006364.2(SEC23A): c.2104A > | 10484 | SEC23A | [′TGTTCAGTGTCAATGTATCTTGGCAYTGGA |
| | G (p.Met702Val) | | | AATCTGGAGTGAAGAATTTCC′] |
| 4324 | NM_001139.2(ALOX12B): c.1562A > | 242 | ALOX12B | [′ACCCTCCACGGCTGCGTCACTCGGGYAAT |
| | G (p.Tyr521Cys) | | | AATAGGTGATGATCTCCGTCAC′] |
| 4325 | NM_001004434.2(SLC30A2): c.161A > | 7780 | SLC30A2 | [′GTGACTGTCAGGACCCTTCTGAGCAYGGC |
| | > G (p.His54Arg) | | | AGTGATGGTTGCTCTGGGCAGC′] |
| 4326 | NM_001168272.1(ITPR1): c.1759A | 3708 | ITPR1 | [′CACTATCACTGCCCTGCTCCACAATRATCG |
| | > G (p.Asn587Asp) | | | GAAACTCCTGGAAAAACACAT′] |
| 4327 | m.15923A > G | −1 | — | [′ATAAACTAATACACCAGTCTTGTAARCCG |
| | | | | GAGATGAAAACCTTTTTCCAAG′] |
| 4328 | NM_007332.2(TRPA1): c.2564A > G | −1 | — | [′TTTTTTTACTTTTCTAGATTTGAAARTTGTG |
| | (p.Asn855Ser) | | | GAATTTTTATTGTTATGTTG′] |
| 4329 | NM_014254.2(TMEM5): c.1016A > | 10329 | TMEM5 | [′CCGGTCGGAGTAAACACAGAATGCTRTCG |
| | G (p.Tyr339Cys) | | | AATCTATGAGGCTTGCTCCTAT′] |
| 4330 | NM_144577.3(CCDC114): c.487 − | 93233 | CCDC114 | [′ACTGATTTTTTTCTCCTCCCCCCACRGGAG |
| | 2A > G | | | ATCCACCACCTGCATCACCTG′] |
| 4331 | NM_000834.3(GRIN2B): c.2172 − | 2904 | GRIN2B | [′GGATTTGTTTGCTTTTTTCCTGTACRGGAA |
| | 2A > G | | | ACTGGATGCCTTCATCTATGA′] |
| 4332 | NM_018486.2(HDAC8): c.539A > G | 55869 | HDAC8 | [′ATTCTCTACGTGGATTTGGATCTGCRCCAT |
| | (p.His180Arg) | | | GGAGATGGTAAGCCCTTTGGT′] |
| 4333 | NM_018486.2(HDAC8): c.1001A > | 55869 | HDAC8 | [′ACACTATCCTCTGAGATCCCAGATCRTGAG |
| | G (p.His334Arg) | | | GTAAGTAAGGCTCTGACAAGT′] |
| 4334 | NM_178012.4(TUBB2B): c.767A > | 347733 | TUBB2B | [′GCAGACCTGCGCAAGCTGGCGGTGARCAT |
| | G (p.Asn256Ser) | | | GGTGCCCTTCCCTCGCCTGCAC′] |
| 4335 | NM_006888.4(CALM1): c.293A > G | 801 | CALM1 | [′ATTGCTGAATGTTCACAGGATGGCARTGGT |
| | (p.Asn98Ser) | | | TATATCAGTGCAGCAGAACTA′] |
| 4336 | NM_172107.2(KCNQ2): c.1636A > | 3785 | KCNQ2 | [′GCCCCACCCACCCCCCTGCAGTGTCRTGCG |
| | G (p.Met546Val) | | | GTTCCTGGTGTCCAAGCGGAA′] |
| 4337 | NM_001866.2(COX7B): c.41 − 2A > G | 1349 | COX7B | [′TGTATTCTTTTTTCGTTTTCCTGTARGTTCG |
| | | | | AAGCATTCAGCAAACAATGG′] |
| 4338 | NM_001099922.2(ALGl3): c.339A > | 79868 | ALGl3 | [′TGAACAATCATCAGCTGGAACTGGCRAAG |
| | G (p.Ala113=) | | | CAGCTACACAAAGAGGGTCATC′] |
| 4339 | NM_001083614.1(EARS2): c.502A > | 124454 | EARS2 | [′CCCCATCAGGTATGACAATCGGTGCRGGA |
| | G (p.Arg168Gly) | | | ACATGAGCCAGGAGCAGGTGGC′] |
| 4340 | NM_001083614.1(EARS2): c.193A > | 124454 | EARS2 | [′TGCCTTGTACAACTACATCTTTGCTRAGAA |
| | G (p.Lys65Glu) | | | GTACCAGGGGAGCTTCATCCT′] |
| 4341 | NM_033109.4(PNPT1): c.1160A > G | 87178 | PNPT1 | [′ACCCTTCATGGATCAGCATTATTTCRAAGA |
| | (p.Gln387Arg) | | | GGACAAACACAGGTAATTTAT′] |
| 4342 | NM_033109.4(PNPT1): c.1424A > G | 87178 | PNPT1 | [′CCTTTCACCATAAGAGTTACATCTGRAGTC |
| | (p.Glu475Gly) | | | CTAGAGTCAAATGGTATGGTA′] |
| 4343 | NM_000390.2(CHM): c.1520A > G | 1121 | CHM | [′ATTTTTTTTTTAACAGATTTGGTTCRTTTGA |
| | (p.His507Arg) | | | CTTGCACATCTTCTAAAACA′] |
| 4344 | NM_181690.2(AKT3): c.686A > G | 10000 | AKT3 | [′TTGTGTTTTGTGATGGAATATGTTARTGGG |
| | (p.Asn229Ser) | | | GGCGAGGTGAGTCAAGAAGTA′] |
| 4345 | NM_006567.3(FARS2): c.431A > G | 10667 | FARS2 | [′CCCAGCAGGAAGAAGGGGGACAACTRTTA |
| | (p.Tyr144Cys) | | | CCTGAATCGGACTCACATGCTG′] |
| 4346 | NM_001410.2(MEGF8): c.7099A > | 1954 | MEGF8 | [′CAAGTGCCGGGAATCATTTCACGGGRGTC |
| | G (p.Ser2367 Gly) | | | CGCTGGGCGGCCAGCAGTGCTA′] |
| 4347 | NM_003124.4(SPR): c.596 − 2A > G | 6697 | SPR | [′CCTCATCGTCTCCTTTTCATCCTCTRGGTCC |
| | | | | TCTGGACACAGACATGCAGC′] |
| 4348 | NM_005609.2(PYGM): c.152A > G | 5837 | PYGM | [′GACCGCAATGTGGCCACCCCACGAGRCTA |
| | (p.Asp51Gly) | | | CTACTTTGCTCTGGCCCATACC′] |
| 4349 | NM_004247.3(EFTUD2): c.623 A > | 9343 | EFTUD2 | [′TTACTTAGTATTTGCTTTTCAGGACRTGTG |
| | G (p.His208Arg) | | | AATTTCTCTGATGAGGTCACA′] |
| 4350 | NM_001310338.1(MGME1): c.743 | 92667 | MGME1 | [′GCTGTTCAACATGAAACCTTAAACTRTATA |
| | A > G (p.Tyr248Cys) | | | GGTCTGCTGGACTGTGTGGCT′] |
| 4351 | NM_001128085.1(ASPA): c.433 − | −1 | — | [′AAGAAAGACGTTTTTGATTTTTTTCRGACT |
| | 2A > G | | | TCTCTGGCTCCACTACCCTGC′] |
| 4352 | NM_000108.4(DLD): c.1444A > G | 1738 | DLD | [′TGGAGCATCCTGTGAAGATATAGCTRGAG |
| | (p.Arg482Gly) | | | TCTGTCATGCACATCCGGTAAT′] |
| 4353 | NM_007215.3(POLG2): c.1105A > G | 11232 | POLG2 | [′ACTAACATTAAGAACAAACAAACCCNTAT |
| | (p.Arg369Gly) | | | TTTTAGTTTCCCAAGTCTATCT′] |
| 4354 | NM_004333.4(BRAF): c.2126A > G | 673 | BRAF | [′AGAGATGAGAGACCACTCTTTCCCCRAGT |
| | (p.Gln709Arg) | | | AAGTAAAAGCTTCATGCTATCC′] |
| 4355 | NM_004985.4(KRAS): c.65A > G | 3845 | KRAS | [′GTAGGCAAGAGTGCCTTGACGATACDGCT |
| | (p.Gln22Arg) | | | AATTCAGAATCATTTTGTGGAC′] |
| 4356 | NM_004985.4(KRAS): c.458A > G | 3845 | KRAS | [′ACTTTTTATGTATTTCAGGGTGTTGDTGAT |
| | (p.Asp153Gly) | | | GCCTTCTATACATTAGTTCGA′] |
| 4357 | NM_002834.3(PTPN11): c.124A > G | 5781 | PTPN11 | [′TAGTAAAAGTAACCCTGGAGACTTCRCAC |
| | (p.Thr42Ala) | | | TTTCCGTTAGGTAAGTTGGAAT′] |
| 4358 | NM_002834.3(PTPN11): c.172A > G | 5781 | PTPN11 | [′AGCTGTCACCCACATCAAGATTCAGNACA |
| | (p.Asn58Asp) | | | CTGGTGATTACTATGACCTGTA′] |
| 4359 | NM_002834.3(PTPN11): c.767A > G | 5781 | PTPN11 | [′TTTCTTTCTTTCCAGACACTACAACRACAG |
| | (p.Gln256Arg) | | | GAGTGCAAACTTCTCTACAGC′] |
| 4360 | NM_002834.3(PTPN11): c.844A > G | 5781 | PTPN11 | [′CAAAAACAAAAATAGATATAAAAACRTCC |
| | (p.Ile282Val) | | | TGCCCTGTAAGTATCAATATTC′] |
| 4361 | NM_002834.3(PTPN11): c.1510A > | 5781 | PTPN11 | [′GATGGTGCGGTCTCAGAGGTCAGGGRTGG |
| | G (p.Met504Val) | | | TCCAGACAGAAGCACAGTACCG′] |
| 4362 | NM_002880.3(RAF1): c.524A > G | 5894 | RAF1 | [′ACTTGTGGCTACAAATTTCATGAGCRCTGT |
| | (p.His175Arg) | | | AGCACCAAAGTACCTACTATG′] |
| 4363 | NA4_002880.3(RAF1): c.1279A > G | 5894 | RAF1 | [′AATTGTGACCCAGTGGTGCGAGGGCRGCA |
| | (p.Ser427Gly) | | | GCCTCTACAAACACCTGCATGT′] |
| 4364 | NM_005633.3(SOS1): c.508A > | 6654 | SOS1 | [′TATTAAAGTGGCAATGTGTGCTGACRAGG |
| | (p.Lys170Glu) | | | TAGGAAACTGAGCTTTTCTATT′] |
| 4365 | NM_030662.3(MAP2K2): c.181A > | 5605 | MAP2K2 | [′GCGGCTGGAAGCCTTTCTCACCCAGRAAG |
| | G (p.Lys61Glu) | | | CCAAGGTCGGCGAACTCAAAGA′] |
| 4366 | NM_024334.2(TMEM43): c.271A > | 79188 | TMEM43 | [′GGAGAATGAAGGAAGGCTGGTGCACRTCA |
| | G (p.Ile91Val) | | | TTGGCGCCTTACGGACATCCAA′] |
| 4367 | NM_000084.4(CLCN5): c.1637A > G | 1184 | CLCN5 | [′CTGATGGCTGCAGCCATGACAAGCARGTG |
| | (p.Lys546Arg) | | | GGTGGCAGATGCTCTTGGGCGG′] |
| 4368 | NM_000084.4(CLCN5): c.815A > G | 1184 | CLCN5 | [′CCTTCTTTCTTCTAGGTCAGCTACTRTTTTC |
| | (p.Tyr272Cys) | | | CCCTCAAAACATTGTGGCGT′] |
| 4369 | NM_000095.2(COMP): c.1760A > G | 1311 | COMP | [′GGCGTGGACTTCGAGGGCACGTTCCRTGT |
| | (p.His587Arg) | | | GAACACGGTCACGGATGACGAC′] |
| 4370 | NM_000530.6(MPZ): c.389A > G | 4359 | MPZ | [′AATGGCACGTTCACTTGTGACGTCARAAA |
| | (p.Lys130Arg) | | | CCCTCCAGACATAGTGGGCAAG′] |
| 4371 | NM_000530.6(MPZ): c.347A > G | 4359 | MPZ | [′AAGGATGGCTCCATTGTCATACACARCCTA |
| | (p.Asn116Ser) | | | GACTACAGTGACAATGGCACG′] |
| 4372 | NA4_003611.2(OFD1): c.260A > G | 8481 | OFD1 | [′GCAGATCACTTACAAAGATGTGGCTDTGA |
| | (p.Tyr87Cys) | | | ATATTCACTTTCTGTTTTCTTT′] |
| 4373 | NA4_003611.2(OFD1): c.290A > G | 8481 | OFD1 | [′TATTCACTTTCTGTTTTCTTTCCAGRAAGTG |
| | (p.Glu97Gly) | | | GTTTGGCAAAAGAAAAGGTA′] |
| 4374 | NA4_003611.2(OFD1): c.382 − 2A > G | 8481 | OFD1 | [′TAAAAGTGAAATATTTTCTTTTAACRGGTT |
| | | | | TCAGGATCTGATAAAGAAAAT′] |
| 4375 | NM_003977.3(AIP): c.721A > G | 9049 | AIP | [′GCTGCTGCTCAACTACTGCCAGTGCDAGCT |
| | (p.Lys241Glu) | | | GGTGGTCGAGGAGTACTACGA′] |
| 4376 | NM_006158.4(NEFL): c.293A > G | 4747 | NEFL | [′GAGAAGGCGCAGCTCCAGGACCTCARTGA |
| | (p.Asn98Ser) | | | CCGCTTCGCCAGCTTCATCGAG′] |
| 4377 | NA4_024312.4(GNPTAB): c.3053A > | 79158 | GNPTAB | [′ATATCTCAAGTCTTTGATGAAGTTGRTACA |
| | G (p.Asp1018Gly) | | | GATCAATCTGGTGTCTTGTCT′] |
| 4378 | NA4_025137.3(SPGl1): c.1457 − | 80208 | SPG11 | [′TAAAGCTAACTTTTATTTTTCCTATRGAGA |
| | 2A > G | | | ATGGACTCTCTCTGATTTTGT′] |
| 4379 | NM_025137.3(SPGl1): c.2608A > G | 80208 | SPG11 | [′ACAAGAATCCATCCTTCTCCCCAGGRTAAG |
| | (p.Ile870Val) | | | TCCAGAAGGCAAGTGTGAGAG′] |
| 4380 | NM_025137.3(SPGl1): c.2833A > G | 80208 | SPG11 | [′GAATGAAATTTTAGATAAGCTGGCCRGGT |
| | (p.Arg945Gly) | | | ATTATAACTGTTGAACTAATAC′] |
| 4381 | NA4_025137.3(SPGl1): c.6477 + 4A > | 80208 | SPG11 | [′CAGTGAGGAGTATGGGCTGGTGGTARGTA |
| | G | | | GCCCCCTCAACCCCAGTCTCCA′] |
| 4382 | NM_212472.2(PRKAR1A): c.178 − | 5573 | PRKAR1A | [′ATTTTGCAAACTCGTAATTTCTTTCRGGAG |
| | 2A > G | | | GAGGCAAAACAGATTCAGAAT′] |
| 4383 | NM_006231.3(POLE): c.4444 + 3A > | 5426 | POLE | [′CCAGTTCAGCTACCTGGAACCAGGTRTGG |
| | G | | | CCTGCACCAGCCGCCCATCATG′] |
| 4384 | NM_003156.3(STEV11): c.251A > G | 6786 | STEV11 | [′GACGATGATGCCAATGGTGATGTGGRTGT |
| | (p.Asp84Gly) | | | GGAAGAAAGTGATGAGGTGAGC′] |
| 4385 | NM_003156.3(STEV11): c.326A > G | 6786 | STEV11 | [′CCAACAGTGAAACACAGCACCTTCCRTGG |
| | (p.His109Arg) | | | TGAGGATAAGCTCATCAGCGTG′] |
| 4386 | NM_001128425.1(MUTYH): c.934 − | 4595 | MUTYH | [′GGCTAAGAGCTGTTCCTGCTCCACCYGAG |
| | 2A > G | | | AGGCACAGGGTTGAGTGTCATA′] |
| 4387 | NM_133499.2(SYN1): c.1699A > G | 6853 | SYN1 | [′GGCGGAGCCGGGCCAGAGACGGATGYCTG |
| | (p.Thr567Ala) | | | ACGGGTAGCCTGTGGGGGGCCC′] |
| 4388 | NM_021629.3(GNB4): c.265A > G | 59345 | GNB4 | [′TATTTGGGATAGCTATACAACAAATRAGG |
| | (p.Lys89Glu) | | | TAGAATTTCTTCATAATTCTTT′] |
| 4389 | NM_138425.3(C12orf57): c.1A > G | 113246 | C12orf57 | [′CTGAACCTAGAGCTTCAGACGCCCTRTGGC |
| | (p.Met1Val) | | | GTCCGCCTCGACCCAACCGGC′] |
| 4390 | NM_000096.3(CP): c.2953A > G | 1356 | CP | [′GGGAGATGAAGTCAACTGGTATCTGRTGG |
| | (p.Met985Val) | | | GAATGGGCAATGAAATAGACTT′] |
| 4391 | NM_000057.3(BLM): c.1088 − 2A > G | 641 | BLM | [′AATATTAACAACATAATTATTTTATRGCTA |
| | | | | GACAGATAAGTTTACAGCAGC′] |
| 4392 | NM_000257.3(MYH7): c.5807A > G | 4625 | MYH7 | [′TTTCAAAAGGGCTTGAATGAGGAGTRGCT |
| | (p.Ter1936Trp) | | | TTGCCACATCTTGATCTGCTCA′] |
| 4393 | NM_152263.3(TPM3): c.505A > G | 7170 | TPM3 | [′GGATCTTTTCCTGTAGGTGGCTCGTRAGTT |
| | (p.Lys169Glu) | | | GGTGATCATTGAAGGAGACTT′] |
| 4394 | NM_152263.3(TPM3): c.733A > G | 7170 | TPM3 | [′AGAGACCCGTGCTGAGTTTGCTGAGRGAT |
| | (p.Arg245Gly) | | | CGGTAGCCAAGCTGGAAAAGAC′] |
| 4395 | NM_000096.3(CP): c.1209 − 2A > G | 1356 | CP | [′GCATTAAACACTTTTTTCCCCCTGCRGTGA |
| | | | | CTCAGCGGTGTTTTTTGAACA′] |
| 4396 | NM_002739.3(PRKCG): c.76A > G | 5582 | PRKCG | [′CCTGTTTTGCAGAAAGGGGGCCCTGRGGC |
| | (p.Arg26Gly) | | | AGAAGGTGGTCCACGAAGTCAA′] |
| 4397 | NM_000138.4(FBN1): c.1148 − | 2200 | FBN1 | [′GTGTTTTGTTTTGTTGTGTTTTTCTRGAGGA |
| | 2A > G | | | TTTCAACAAGCTGTGCTCTG′] |
| 4398 | NM_000138.4(FBN1): c.3058A > G | 2200 | FBN1 | [′ACCCGGATTTGCCACAAAAGAAATTRCAA |
| | (p.Thr1020Ala) | | | ATGGAAAGCCTTTCTTCAAAGG′] |
| 4399 | NM_000169.2(GLA): c.1153A > G | −1 | — | [′GGCCTGTAATCCTGCCTGCTTCATCRCACA |
| | (p.Thr385Ala) | | | GCTCCTCCCTGTGAAAAGGAA′] |
| 4400 | NM_000256.3(MYBPC3): c.1224 − | 4607 | MYBPC3 | [′ACTTCAACGGCCCCTTCTGTTCTACRGCAA |
| | 2A > G | | | GTAAGTTCCCCTCTGGATGGC′] |
| 4401 | NM_000256.3(MYBPC3): c.1814A > | 4607 | MYBPC3 | [′GTCAGCCTCGTCGGCAGGTGTGACGYCGT |
| | G (p.Asp605Gly) | | | CAATGGTCAGTTTGTGGACCCT′] |
| 4402 | NM_000256.3(MYBPC3): c.1928 − | 4607 | MYBPC3 | [′CTCTGAACTACATTGTGTCTTCTGCRGAAC |
| | 2A > G | | | CTCCCAAGATCCACCTGGACT′] |
| 4403 | NM_000256.3(MYBPC3): c.2309 − | 4607 | MYBPC3 | [′GGGCCGCAGGTGCGTCTGGCACGTCBGGA |
| | 2A > G | | | TGGGGTGGGATGGACCCACATC′] |
| 4404 | NM_000256.3(MYBPC3): c.26 − | 4607 | MYBPC3 | [′GTGGCTTCTTGCTAAAAGCTGAGACYGAA |
| | 2A > G | | | GGGCCAGGTGGAGGCTACAGCG′] |
| 4405 | NM_000256.3(MYBPC3): c.927 − | 4607 | MYBPC3 | [′GGCCACAGCCTAGACTGCGGGACACRGGG |
| | 2A > G | | | ACTCGAAGCTGGAGGCACCAGC′] |
| 4406 | NM_000257.3(MYH7): c.2206A > G | 4625 | MYH7 | [′AGCGGCCATCCCTGAGGGACAGTTCRTTG |
| | (p.Ile736Val) | | | ATAGCAGGAAGGGGGCAGAGAA′] |
| 4407 | NM_000257.3(MYH7): c.2681A > G | 4625 | MYH7 | [′CTCCCCTCTGTTCCTCACCTTCAGGDACAA |
| | (p.Glu894Gly) | | | GACAACCTGGCAGATGCTGAG′] |
| 4408 | NM_000260.3(MYO7A): c.1344 − | 4647 | MYO7A | [′CCTTACCCCATCCCTGTGCCCCTGCRGCTT |
| | 2A > G | | | TGAGCAGCTCTGCATCAACTT′] |
| 4409 | NM_000260.3(MYO7A): c.6029A > | 4647 | MYO7A | [′GTGCCAGGGAAGGATCCCATGGCCGRTTC |
| | G (p.Asp2010Gly) | | | CATCTTCCACTATTACCAGGTG′] |
| 4410 | NM_000260.3(MYO7A): c.6439 − | 4647 | MYO7A | [′CTCTCTATGCCCTTTCTGCTCCCCCRGGAT |
| | 2A > G | | | ATCCTCACCACTCATCCCTTC′] |
| 4411 | NM_000441.1(SLC26A4): c.-3 − | −1 | — | [′CCCTCCTCGCTGTCCTCTGGCTCGCRGGTC |
| | 2A > G | | | ATGGCAGCGCCAGGCGGCAGG′] |
| 4412 | NM_000441.1(SLC26A4): c.1149 + 3A > | 5172 | SLC26A4 | [′ATTACACCATCGATGGGAACCAGGTDTGG |
| | G | | | GTGCCCTTTTGCTGAACTGGTT′] |
| 4413 | NM_000551.3(VHL): c.467A > G | 7428 | VHL | [′GATTTGGTTTTTGCCCTTCCAGTGTRTACTC |
| | (p.Tyr156Cys) | | | TGAAAGAGCGATGCCTCCAG] |
| 4414 | NM_002294.2(LAMP2): c.65 − 2A > G | 3920 | LAMP2 | [′AAATATTATTTTTTTAAATGAATCCRGGAG |
| | | | | CTGTGCGGTCTTATGCATTGG′] |
| 4415 | NM_004004.5(GJB2): c.1A > G | 2706 | GJB2 | [′CAGAGCAAACCGCCCAGAGTAGAAGRTGG |
| | (p.Met1Val) | | | ATTGGGGCACGCTGCAGACGAT′] |
| 4416 | NM_004004.5(GJB2): c.617A > G | 2706 | GJB2 | [′GTGTCTGGAATTTGCATCCTGCTGARTGTC |
| | (p.Asn206Ser) | | | ACTGAATTGTGTTATTTGCTA′] |
| 4417 | NM_033360.3(KRAS): c.182A > G | 3845 | KRAS | [′TTGGATATTCTCGACACAGCAGGTCNAGA |
| | (p.Gln6lArg) | | | GGAGTACAGTGCAATGAGGGAC′] |
| 4418 | NM_006218.2(PIK3CA): c.1637A > | 5290 | PIK3CA | [′GATCCTCTCTCTGAAATCACTGAGCRGGAG |
| | G (p.Gln546Arg) | | | AAAGATTTTCTATGGAGTCAC′] |
| 4419 | NM_006218.2(PIK3CA): c.3073A > | 5290 | PIK3CA | [′TGATGACATTGCATACATTCGAAAGRCCCT |
| | G (p.Thr1025Ala) | | | AGCCTTAGATAAAACTGAGCA′] |
| 4420 | NM_032119.3(ADGRV1): c.14973 − | 84059 | ADGRV1 | [′TTCTTCATGATTTAATTTTTTTCCCRGATCA |
| | 2A > G | | | GGTTTCATTGTTGCTGAAAT′] |
| 4421 | NM_033056.3(PCDH15): c.1998 − | 65217 | PCDH15 | [′TTATTTGTTTGTTTGTTTTGTCACTRGCACG |
| | 2A > G | | | GGGATTCTAACCTTAGGGAA′] |
| 4422 | NM_138691.2(TMC1): c.1763 + 3A > | 117531 | TMC1 | [′ATCTTCAACCAAGGCATGATCTGGTRGGCC |
| | G | | | AGCTGTTGGACAGCTTATCAC′] |
| 4423 | NM_206933.2(USH2A): c.12067 − | 7399 | USH2A | [′CAACTTAACCTGTTAATTTTCTTACRGGGA |
| | 2A > G | | | ACAAGCCATCAAGCCCACCTG′] |
| 4424 | NM_206933.2(USH2A): c.12295 − | 7399 | USH2A | [′CCCGTCACTGAAGATGTTGTATGTCYACAG |
| | 2A > G | | | AAGGACAGAAGCAAAAGGGAT′] |
| 4425 | NM_206933.2(USH2A): c.1841 − | 7399 | USH2A | [′ATAATGCATAACCTTTCCCTGATGCRGGAA |
| | 2A > G | | | GGAACTGTGAGCTGTGCAAGG′] |
| 4426 | NM_206933.2(USH2A): c.8559 − | 7399 | USH2A | [′GATGTTCCTGCTTGTCTTTTGCTTTRGATAT |
| | 2A > G | | | GAGCTTCTGAGACGTAAAAT′] |
| 4427 | NM_03241S.5(CARD11): c.401A > | 84433 | CARD11 | [′GGCCTCACGCACTTCCTGATGAACGRGGTC |
| | G (p.Glu134Gly) | | | ATCAAGCTGCAGCAGCAGATG′] |
| 4428 | NM_000548.3(TSC2): c.226 − 2A > G | 7249 | TSC2 | [′CACCGCTGTCCCCTCTGCTGGTGACRGCAC |
| | | | | GCAGTGGAAGCACTCTGGAAG′] |
| 4429 | NM_000548.3(TSC2): c.1444 − 2A > G | 7249 | TSC2 | [′TCATTGGCCTCCCTTGTGCCTGTGCRGGAG |
| | | | | GAGCTGATTAACTCAGTGGTC′] |
| 4430 | NM_000548.3(TSC2): c.2546 − 2A > G | 7249 | TSC2 | [′CCCTGACCACCCTCTCCATTACCGCDGCTC |
| | | | | TGGCCAGGCTGCCGCACCTCT′] |
| 4431 | NM_130466.3(UBE3B): c.545 − | 89910 | UBE3B | [′TTTGTTCTCACTGTTTTCTTTCTTTRGGTGA |
| | 2A > G | | | AAGTCTTCGACCAGCGATGA′] |
| 4432 | NM_005430.3(WNT1): c.624 + 4A > | 7471 | WNT1 | [′CAACAACGAGGCAGGCCGTACGGTGRGCT |
| | G | | | TTGAGAGGCTCCGCACCCTAAG′] |
| 4433 | NM_001893.4(CSNK1D): c.137A > | 1453 | CSNK1D | [′AAGCTTGAATGTGTCAAAACCAAACRCCC |
| | G (p.His46Arg) | | | TCAGCTCCACATTGAGAGCAAA′] |
| 4434 | NM_018972.2(GDAP1): c.368A > G | 54332 | GDAP1 | [′AGCATGTATTACCCACGGGTACAACRTTAC |
| | (p.His123Arg) | | | CGAGAGCTGCTTGACTCCTTG′] |
| 4435 | NM_032237.4(POMK): c.773A > G | 84197 | POMK | [′CATGGGGATTTCGTGGCTCCAGAGCRACT |
| | (p.Gln258Arg) | | | GTGGCCCTATGGAGAGGACGTG′] |
| 4436 | NM_201647.2(STAMBP): c.125A > | 10617 | STAMBP | [′CGTCGGTACTTCCGCTCTGGAGTTGRGATT |
| | G (p.Glu42Gly) | | | ATCCGAATGGCATCCATTTAC′] |
| 4437 | NM_001946.3(DUSP6): c.566A > G | 1848 | DUSP6 | [′ACTACCATCCGAGTCTGTTGCACTAYTGGG |
| | (p.Asn189Ser) | | | GTCTCGGTCAAGGTCAGACTC′] |
| 4438 | NM_003867.3(FGF17): c.560A > G | 8822 | FGF17 | [′TACCAAGGCCAGCTGCCCTTCCCCARCCAC |
| | (p.Asn187Ser) | | | GCCGAGAAGCAGAAGCAGTTC′] |
| 4439 | NM_013281.3(FLRT3): c.1016A > G | −1 | — | [′GGGCTCATGTGCCAAGCCCCAGAAARGGT |
| | (p.Lys339Arg) | | | TCGTGGGATGGCTATTAAGGAT′] |
| 4440 | NM_015560.2(OPA1): c.1146A > G | 4976 | OPA1 | [′TTTTTATTTTTCCTGAGTAGACCATRTCCTT |
| | (p.Ile382Met) | | | AAATGTAAAAGGCCCTGGAC′] |
| 4441 | NM_030964.3(SPRY4): c.530A > G | 81848 | SPRY4 | [′CCGGCGGTCCCACCCGAGCTGGACARGCA |
| | (p.Lys177Arg) | | | CTTCTTGCTGTGCGAGGCCTGT′] |
| 4442 | NM_002972.3(SBF1): c.1249A > G | 6305 | SBF1 | [′AAGGCCATGCCCTCCAGCACCTTCAYCAG |
| | (p.Met417Val) | | | GAAATCGTCCTCTACCAGCCCA′] |
| 4443 | NM_002972.3(SBF1): c.4768A > G | 6305 | SBF1 | [′TACATGTAATTGTGGAACACAGGCGYCCT |
| | (p.Thr1590Ala) | | | CTTGCTCAGCCGGTCCACATAC′] |
| 4444 | NM_006876.2(B4GAT1): c.1168A > | 11041 | B4GAT1 | [′GTTCCATCCCCAAAAGGAGGCTGAARATC |
| | G (p.Asn390Asp) | | | AGCACAATAAGATCCTATATCG′] |
| 4445 | NM_000059.3(BRCA2): c.517 − | 675 | BRCA2 | [′AAAATAAACTATTTTCTTTCCTCCCVGGGT |
| | 2A > G | | | CGTCAGACACCAAAACATATT′] |
| 4446 | NM_000059.3(BRCA2): c.6938 − | 675 | BRCA2 | [′ATGTAATATAAAATAATTGTTTCCTRGGCA |
| | 2A > G | | | CAATAAAAGATCGAAGATTGT′] |
| 4447 | NM_000059.3(BRCA2): c.7008 − | 675 | BRCA2 | [′AACTTATATATTTTCTCCCCATTGCDGCAC |
| | 2A > G | | | AACTAAGGAACGTCAAGAGAT′] |
| 4448 | NM_000059.3(BRCA2): c.7806 − | 675 | BRCA2 | [′GATAATATTCTACTTTTATTTGTTCRGGGC |
| | 2A > G | | | TCTGTGTGACACTCCAGGTGT′] |
| 4449 | NM_000059.3(BRCA2): c.8754 + 4A > | 675 | BRCA2 | [′AGCAGACCCAGCTTACCTTGAGGTGRGAG |
| | G | | | AGTAAGAGGACATATAATGAGG′] |
| 4450 | NM_000059.3(BRCA2): c.9118 − | 675 | BRCA2 | [′GTTGAATTTTTGTTTTGTTTTCTGTRGGTTT |
| | 2A > G | | | CAGATGAAATTTTATTTCAG′] |
| 4451 | NM_000059.3(BRCA2): c.9649 − | 675 | BRCA2 | [′TAGGCTACGTTTTCATTTTTTTATCRGATGT |
| | 2A > G | | | CTTCTCCTAATTGTGAGATA′] |
| | NM_000218.2(KCNQ1): c.1070A > | 3784 | KCNQ1 | [] |
| | G (p.Gln357Arg) | | | |
| 4452 | NM_000218.2(KCNQ1): c.1085A > | 3784 | KCNQ1 | [′AAGGTGCAGCAGAAGCAGAGGCAGARGC |
| | G (p.Lys362Arg) | | | ACTTCAACCGGCAGATCCCGGCG] |
| 4453 | NM_000218.2(KCNQ1): c.1576A > | 3784 | KCNQ1 | [′TCGACGCATGCAGTACTTTGTGGCCVAGA |
| | G (p.Lys526Glu) | | | AGAAATTCCAGGTAAGCCCTGT′] |
| | NM_000218.2(KCNQ1): c.1756A > | 3784 | KCNQ1 | [] |
| | G (p.Asn586Asp) | | | |
| 4454 | NM_000218.2(KCNQ1): c.332A > G | 3784 | KCNQ1 | [′CGCACCCACGTCCAGGGCCGCGTCTRCAA |
| | (p.Tyr111Cys) | | | CTTCCTCGAGCGTCCCACCGGC′] |
| | NM_000218.2(KCNQ1): c.344A > G | 3784 | KCNQ1 | [] |
| | (p.Glu115Gly) | | | |
| 4455 | NM_000218.2(KCNQ1): c.773A > G | 3784 | KCNQ1 | [′CTCCTGGGCTCCGTGGTCTTCATCCVCCGC |
| | (p.His258Arg) | | | CAGGTGGGTGGCCCGGGTTAG′] |
| 4456 | NM_000218.2(KCNQ1): c.944A > G | 3784 | KCNQ1 | [′CAGGTCACAGTCACCACCATCGGCTNTGG |
| | (p.Tyr315Cys) | | | GGACAAGGTGCCCCAGACGTGG′] |
| | NM_000218.2(KCNQ1): c.964A > G | 3784 | KCNQ1 | [] |
| | (p.Thr322Ala) | | | |
| 4457 | NM_000492.3(CFTR): c.1393 − | 1080 | CFTR | [′CCTAATAATGATGGGTTTTATTTCCRGACT |
| | 2A > G | | | TCACTTCTAATGGTGATTATG′] |
| 4458 | NM_000492.3(CFTR): c.1766 + 3A > | 1080 | CFTR | [′ACAGAAAAAGAAATATTTGAAAGGTVTGT |
| | G | | | TCTTTGAATACCTTACTTATAA′] |
| 4459 | NM_000492.3(CFTR): c.1A > G | 1080 | CFTR | [′CAGGGACCCCAGCGCCCGAGAGACCRTGC |
| | (p.Met1Val) | | | AGAGGTCGCCTCTGGAAAAGGC′] |
| 4460 | NM_000492.3(CFTR): c.2989 − | 1080 | CFTR | [′ACCAACATGTTTTCTTTGATCTTACDGTTG |
| | 2A > G | | | TTATTAATTGTGATTGGAGCT′] |
| 4461 | NM_000492.3(CFTR): c.579 + 3A > G | 1080 | CFTR | [′ACAACCTGAACAAATTTGATGAAGTNTGT |
| | | | | ACCTATTGATTTAATCTTTTAG′] |
| 4462 | NM_007294.3(BRCA1): c.122A > G | 672 | BRCA1 | [′GAACCTGTCTCCACAAAGTGTGACCRCAT |
| | (p.His41Arg) | | | ATTTTGCAAGTAAGTTTGAATG′] |
| 4463 | NM_007294.3(BRCA1): c.1A > G | 672 | BRCA1 | [′TTAAAGTTCATTGGAACAGAAAGAARTGG |
| | (p.Met1Val) | | | ATTTATCTGCTCTTCGCGTTGA′] |
| 4464 | NM_007294.3(BRCA1): c.212 + 3A > | 672 | BRCA1 | [′TGTAAGAATGATATAACCAAAAGGTRTAT |
| | G | | | AATTTGGTAATGATGCTAGGTT′] |
| 4465 | NM_007294.3(BRCA1): c.4097 − | 672 | BRCA1 | [′TCTGAACCTCTGTTTTTGTTATTTAVGGTG |
| | 2A > G | | | AAGCAGCATCTGGGTGTGAGA′] |
| 4466 | NM_007294.3(BRCA1): c.4485 − | 672 | BRCA1 | [′GTTTTCTCCTTCCATTTATCTTTCTRGGTCA |
| | 2A > G | | | TCCCCTTCTAAATGCCCATC′] |
| 4467 | NM_007294.3(BRCA1): c.4987 − | 672 | BRCA1 | [′ATAATGGAATATTTGATTTAATTTCRGATG |
| | 2A > G | | | CTCGTGTACAAGTTTGCCAGA′] |
| 4468 | NM_007294.3(BRCA1): c.5053A > | 672 | BRCA1 | [′AACTAATCTAATTACTGAAGAGACTRCTCA |
| | G (p.Thr1685Ala) | | | TGTTGTTATGAAAACAGGTAT′] |
| 4469 | NM_007294.3(BRCA1): c.5407 − | 672 | BRCA1 | [′AATGCTCTTTCCTTCCTGGGGATCCDGGGT |
| | 2A > G | | | GTCCACCCAATTGTGGTTGTG′] |
| 4470 | NM_000540.2(RYR1): c.97A > G | 6261 | RYR1 | [′CGCTACCGTGCTCAAGGAGCAGCTCRAGC |
| | (p.Lys33Glu) | | | TCTGCCTGGCCGCCGAGGGCTT′] |
| 4471 | NM_015250.3(BICD2): c.2321A > G | 23299 | BICD2 | [′CGGCAGCTGGCGGCTGCTGAGGACGRGAA |
| | (p.Glu774Gly) | | | GAAGACGCTGAACTCGCTGCTG′] |
| 4472 | NM_006012.2(CLPP): c.270 + 4A > G | 8192 | CLPP | [′CATCGTGTGCGTCATGGGCCCGGTGRGCG |
| | | | | CCCCGCGCCGGGACCCTCCCCA′] |
| 4473 | NM_004656.3(BAP1): c.277A > G | 8314 | BAP1 | [′AGGAGCACGCTCAGCAAGGCATGAGHTGC |
| | (p.Thr93Ala) | | | ACAAGAGTTGGGTATCAGCTGT′] |
| 4474 | NM_004315.4(ASAH1): c.965 + 4A > | 427 | ASAH1 | [′AGGAATCATTGGATGTATATGAGTARGTA |
| | G | | | GGTTTGTTAAAGCAAAAGAAGT′] |
| 4475 | NM_000100.3(CSTB): c.169 − 2A > G | 1476 | CSTB | [′GCTTCGCTCACTCCGCTCTCTTCCCRGGTG |
| | | | | CACGTCGGCGACGAGGACTTC′] |
| 4476 | NM_015268.3(DNAJC13): c.2564A > | 23317 | DNAJC13 | [′TTAAAATCTAGGTATGAATTTTTCARTGAG |
| | G (p.Asn855Ser) | | | CTTTATCATCGCTTCTTGCTC′] |
| 4477 | NM_001003722.1(GLE1): c.433 − | 2733 | GLE1 | [′CTTAAAAAAAAAAAAAAAAAAAAAARCCT |
| | 10A > G | | | TTTCAGGAGGGCCTGAGGCTAT′] |
| 4478 | NM_001142519.1(FAM111A): c.1583A > | 63901 | FAM111A | [′TTCCAGAAAATAGTTCACAACCCTGDTGTG |
| | G (p.Asp528Gly) | | | ATTACCTATGACACTGAATTT′] |
| 4479 | NM_001142519.1(FAM111A): c.1012A > | 63901 | FAM111A | [′GCATAGAACAACGTTTGGGAAAGTARCAA |
| | G (p.Thr338Ala) | | | AAAATTCTTCTTCGATTAAAGT′] |
| 4480 | NM_001927.3(DES): c.1289 − 2A > G | 1674 | DES | [′CTGAGTGTGCGATGGACCCTGTTACRGAA |
| | | | | ACCAGCCCTGAGCAAAGGGGTT′] |
| 4481 | NM_014795.3(ZEB2): c.3134A > G | 9839 | ZEB2 | [′AAACACAAGCACCACCTTATCGAGCRCTC |
| | (p.His1045Arg) | | | AAGGCTTCACTCGGGCGAGAAG′] |
| 4482 | NM_002163.2(IRF8): c.322A > G | 3394 | IRF8 | [′CCAACTGGACATTTCCGAGCCATACRAAG |
| | (p.Lys108Glu) | | | TTTACCGAATTGTTCCTGAGGA′] |
| 4483 | NM_002163.2(IRF8): c.238A > G | 3394 | IRF8 | [′CAAAGCTGAACCAGCCACTTGGAAGRCGA |
| | (p.Thr80Ala) | | | GGTTACGCTGTGCTTTGAATAA′] |
| 4484 | NM_001287.5(CLCN7): c.296A > G | 1186 | CLCN7 | [′TGTCCCGGCCTGCAGAGCTTGGACTRTGAC |
| | (p.Tyr99Cys) | | | AACAGTGAGAACCAGCTGTTC′] |
| 4485 | NM_001127217.2(SMAD9): c.127A > | 4093 | SMAD9 | [′AGAGAAGGCAGTGGACTCTCTAGTGRAGA |
| | G (p.Lys43Glu) | | | AGTTAAAGAAGAAGAAGGGAGC′] |
| 4486 | NM_002246.2(KCNK3): c.575A > G | 3777 | KCNK3 | [′TGGACCTTCTTCCAGGCCTACTACTRCTGC |
| | (p.Tyr192Cys) | | | TTCATCACCCTCACCACCATC′] |
| 4487 | NM_080605.3(B3GALT6): c.1A > G | 126792 | B3GALT6 | [′CGCCACGCCCGCCGCAGCAGCTTCAYGGC |
| | (p.Met1Val) | | | GCCCGCGCCGGGCCGGCGGCCC′] |
| 4488 | NM_080605.3(B3GALT6): c.193A > | 126792 | B3GALT6 | [′CGGCGCTCGGCGGCGCGGGGCGCGCYGGC |
| | G (p.Ser65Gly) | | | CACCAGCACTGCCAGGAAGGCG′] |
| 4489 | NM_000388.3(CASR): c.85A > G | 846 | CASR | [′CGGGCCAGACCAGCGAGCCCAAAAGRAGG |
| | (p.Lys29Glu) | | | GGGACATTATCCTTGGGGGGCT′] |
| 4490 | NM_003793.3(CTSF): c.962A > G | 8722 | CTSF | [′GGGACCCTGCTCTCCCTCTCTGAACRGGGT |
| | (p.Gln321Arg) | | | GAGCATCTCGCTCTACTCCTC′] |
| 4491 | NM_003793.3(CTSF): c.692A > G | 8722 | CTSF | [′GAGATCACTGAACTTGGTGACTCCAYACT |
| | (p.Tyr231Cys) | | | GAGCTGTGCCACGGTCCAGGGC′] |
| 4492 | NM_022114.3(PRDM16): c.2447A > | 63976 | PRDM16 | [′GGCAGCCGGGCCCGTGCCAGCCAAARCGG |
| | G (p.Asn816Ser) | | | CGGCGGGCGGGAGCCCCGCAAG′] |
| 4493 | NM_173551.4(ANKS6): c.1322A > | 203286 | ANKS6 | [′GGGCAGCACTGGGATGCTCCAGGGCYGTC |
| | G (p.Gln441Arg) | | | GGACCTTCGAGTGGGGCAGGGG′] |
| 4494 | NM_005689.2(ABCB6): c.508A > G | 10058 | ABCB6 | [′GAACTTGGCCCTGGTGTCTTGGAACRGCCC |
| | (p.Ser170Gly) | | | ACAGTGGTGGTGGGCAAGGGC′] |
| 4495 | NM_001070.4(TUBG1): c.275A > G | 7283 | TUBG1 | [′AAGCTCTACAACCCAGAGAACATCTRCCT |
| | (p.Tyr92Cys) | | | GTCGGAACATGGAGGAGGAGCT′] |
| 4496 | NM_001613.2(ACTA2): c.145A > G | 59 | ACTA2 | [′ACCTTTTTAGGGGGTGATGGTGGGARTGG |
| | (p.Met49Val) | | | GACAAAAAGACAGCTACGTGGG′] |
| 4497 | NM_031157.2(HNRNPA1): c.956A > | 3178 | HNRNPA1 | [′AGCTACAATGATTTTGGGAATTACARCAAT |
| | G (p.Asn319Ser) | | | CAGTCTTCAAATTTTGGACCC′] |
| 4498 | NM_020117.9(LARS): c.1118A > G | 51520 | LARS | [′CTTAATAGTTAGCATTGGGAGAACAYAGA |
| | (p.Tyr373Cys) | | | TCACCTTGTATGATGTTAAAGG′] |
| 4499 | NM_001651.3(AQP5): c.367A > G | 362 | AQP5 | [′CTAACCCGCTATCCCCTTGCAGCTCRACAA |
| | (p.Asn123Asp) | | | CAACACAACGCAGGGCCAGGC′] |
| 4500 | m.13637A > G | 4540 | MT-NDS | [′ATAATTCTTCTCACCCTAACAGGTCRACCT |
| | | | | CGCTTCCCCACCCTTACTAAC′] |
| 4501 | NM_000081.3(LYST): c.10127A > G | 1130 | LYST | [′GGGAAGGCTTCTGTTCAAGCGATCARTGTT |
| | (p.Asn3376Ser) | | | TTTCATCCTGCTGTAAGTGAC′] |
| 4502 | NM_000142.4(FGFR3): c.2421A > G | 2261 | FGFR3 | [′CCAGCAGTGGGGGCTCGCGGACGTGNAGG |
| | (p.Ter807Trp) | | | GCCACTGGTCCCCAACAATGTG′] |
| 4503 | NM_000207.2(INS): c.*59A > G | −1 | — | [′TCCTGCACCGAGAGAGATGGAATAARGCC |
| | | | | CTTGAACCAGCCCTGCTGTGCC′] |
| 4504 | NM_000370.3(TTPA): c.191A > G | 7274 | TTPA | [′CTGCGCGCCCGGGATTTCGATCTGGRCCTG |
| | (p.Asp64Gly) | | | GCCTGGCGGGTAAGCGTGCGT′] |
| 4505 | NM_001006657.1(WDR35): c.2912A > | 57539 | WDR35 | [′AAACCTTTACGTGTCAAGAAGCTCTRTGTA |
| | G (p.Tyr971Cys) | | | CTGTCAGCCTTACTTATAGAG′] |
| 4506 | NM_004595.4(SMS): c.443A > G | 6611 | SMS | [′GTATATGACGAAGATTCACCTTATCRAAAT |
| | (p.Gln148Arg) | | | ATAAAAATTCTACACTCGAAG′] |
| 4507 | NM_005259.2(MSTN): c.458A > G | −1 | — | [′AAAATACAATACAATAAAGTAGTAARGGC |
| | (p.Lys153Arg) | | | CCAACTATGGATATATTTGAGA′] |
| 4508 | NM_000784.3(CYP27A1): c.1061A > | 1593 | CYP27A1 | [′TGGGCCCTGTACCACCTCTCAAAGGRCCCT |
| | G (p.Asp354Gly) | | | GAGATCCAGGAGGCCTTGCAC′] |
| 4509 | NM_000784.3(CYP27A1): c.776A > | 1593 | CYP27A1 | [′TCACTCTATGCCACCTTCCTCCCCARGTGG |
| | G (p.Lys259Arg) | | | ACTCGCCCCGTGCTGCCTTTC′] |
| 4510 | NM_000540.2(RYR1): c.10100A > G | 6261 | RYR1 | [′ATCCCAACTATCGGGCGGCTGCGCARGAG |
| | (p.Lys3367Arg) | | | GGCAGGGAAGGTGGTGTCCGAG′] |
| 4511 | NM_000540.2(RYR1): c.14572A > G | 6261 | RYR1 | [′CTACCTGTACACCGTGGTGGCCTTCRACTT |
| | (p.Asn4858Asp) | | | CTTCCGCAAGTTCTACAACAA′] |
| 4512 | NM_000540.2(RYR1): c.14740A > G | 6261 | RYR1 | [′CGCGGGTGACGAATACGAGCTCTACRGGG |
| | (p.Arg4914Gly) | | | TGGTCTTCGACATCACCTTCTT′] |
| 4513 | NM_000540.2(RYR1): c.14591A > G | 6261 | RYR1 | [′GCCTTCAACTTCTTCCGCAAGTTCTRCAAC |
| | (p.Tyr4864Cys) | | | AAGAGCGAGGATGAGGATGAA′] |
| 4514 | NM_002336.2(LRP6): c.1298A > G | 4040 | LRP6 | [′GATCGAATAGAAGTGACAAGGCTCARTGG |
| | (p.Asn433Ser) | | | GACCATGAGGAAGATCTTGATT′] |
| 4515 | NM_001257235.1(ALGl3): c.8A > G | 79868 | ALG13 | [′GTTATAAACGAAAAGTTGATGAACARTCA |
| | (p.Asn3Ser) | | | TCAGCTGGAACTGGCAAAGCAG′] |
| 4516 | NM_001015879.1(AURKC): c.379 − | 6795 | AURKC | [′CAGGGTGACTTTTCTTTGCACCCACRGATA |
| | 2A > G | | | ATAGAGGAGTTGGCAGATGCC′] |
| 4517 | NM_012160.4(FBXL4): c.1694A > G | 26235 | FBXL4 | [′AATTGTACCAGGTTACAGCAGCTGGRCAT |
| | (p.Asp565Gly) | | | ATTAGGTAAGGTTACAATATAT′] |
| 4518 | NM_020988.2(GNAO1): c.521A > G | 2775 | GNAO1 | [′GCCGACTACCAGCCCACCGAGCAGGRCAT |
| | (p.Asp174Gly) | | | CCTCCGAACCAGGGTCAAAACC′] |
| 4519 | NM_001927.3(DES): c.1024A > G | 1674 | DES | [′GACCTGGGTTCCCCCTCTCCTGCAGRACGA |
| | (p.Asn342Asp) | | | TTCCCTGATGAGGCAGATGCG′] |
| 4520 | NM_001927.3(DES): c.1333A > G | 1674 | DES | [′GGGTTCTGAGGTCCATACCAAGAAGRCGG |
| | (p.Thr445Ala) | | | TGATGATCAAGACCATCGAGAC′] |
| 4521 | NM_001927.3(DES): c.735 + 3A > G | 1674 | DES | [′TCCTTAAGAAAGTGCATGAAGAGGTRTAC |
| | | | | CTTGGCCCCTCTTCCTGGGGTC′] |
| 4522 | NM_002055.4(GFAP): c.1097A > G | 2670 | GFAP | [′GCCCTGGACATCGAGATCGCCACCTRCAG |
| | (p.Tyr366Cys) | | | GAAGCTGCTAGAGGGCGAGGAG′] |
| 4523 | NM_002055.4(GFAP): c.1112A > G | 2670 | GFAP | [′ATCGCCACCTACAGGAAGCTGCTAGDGGG |
| | (p.Glu371Gly) | | | CGAGGAGAACCGGTGAGCCCTC′] |
| 4524 | NM_002055.4(GFAP): c.1121A > G | 2670 | GFAP | [′TACAGGAAGCTGCTAGAGGGCGAGGRGAA |
| | (p.Glu374Gly) | | | CCGGTGAGCCCTCATCACAGCC′] |
| 4525 | NM_002055.4(GFAP): c.230A > G | 2670 | GFAP | [′GAGCGGGCAGAGATGATGGAGCTCARTGA |
| | (p.Asn77Ser) | | | CCGCTTTGCCAGCTACATCGAG′] |
| 4526 | NM_002055.4(GFAP): c.770A > G | 2670 | GFAP | [′AACATGCATGAAGCCGAAGAGTGGTRCCG |
| | (p.Tyr257Cys) | | | CTCCAAGGTAGCCCTGCCTGTG′] |
| 4527 | NM_002055.4(GFAP): c.835A > G | 2670 | GFAP | [′CAACGCGGAGCTGCTCCGCCAGGCCRAGC |
| | (p.Lys279Glu) | | | ACGAAGCCAACGACTACCGGCG′] |
| 4528 | NM_005554.3(KRT6A): c.511A > G | 3853 | KRT6A | [′GGAGCGTGAACAGATCAAGACCCTCDACA |
| | (p.Asn171Asp) | | | ACAAGTTTGCCTCCTTCATCGA′] |
| 4529 | NM_005554.3(KRT6A): c.512A > G | 3853 | KRT6A | [′GAGCGTGAACAGATCAAGACCCTCAVCAA |
| | (p.Asn171Ser) | | | CAAGTTTGCCTCCTTCATCGAC′] |
| 4530 | NM_005557.3(KRT16): c.373A > G | 3868 | KRT16 | [′TGAGAAGGTGACCATGCAGAACCTCRATG |
| | (p.Asn125Asp) | | | ACCGCCTGGCCTCCTACCTGGA′] |
| 4531 | NM_170707.3(LMNA): c.640 − | 4000 | LMNA | [′TTTTGGTTTCTGTGTCCTTCCTCCAVCCCTT |
| | 10A > G | | | CCAGGAGCTGCGTGAGACCA′] |
| | NM_000218.2(KCNQ1): c.1061A > | 3784 | KCNQ1 | [] |
| | G (p.Lys354Arg) | | | |
| | NM_000218.2(KCNQ1): c.1138A > | 3784 | KCNQ1 | [] |
| | G (p.Arg380Gly) | | | |
| | NM_000218.2(KCNQ1): c.1193A > | 3784 | KCNQ1 | [] |
| | G (p.Lys398Arg) | | | |
| | NM_000218.2(KCNQ1): c.1640A > | 3784 | KCNQ1 | [] |
| | G (p.Gln547Arg) | | | |
| | NM_000218.2(KCNQ1): c.1669A > | 3784 | KCNQ1 | [] |
| | G (p.Lys557Glu) | | | |
| | NM_000218.2(KCNQ1): c.1705A > | 3784 | KCNQ1 | [] |
| | G (p.Lys569Glu) | | | |
| | NM_000218.2(KCNQ1): c.1793A > | 3784 | KCNQ1 | [] |
| | G (p.Lys598Arg) | | | |
| | NM_000218.2(KCNQ1): c.430A > G | 3784 | KCNQ1 | [] |
| | (p.Thr144Ala) | | | |
| | NM_000218.2(KCNQ1): c.440A > G | 3784 | KCNQ1 | [] |
| | (p.Gln147Arg) | | | |
| | NM_000218.2(KCNQ1): c.548A > G | 3784 | KCNQ1 | [] |
| | (p.Lys183Arg) | | | |
| 4532 | NM_000218.2(KCNQ1): c.592A > G | 3784 | KCNQ1 | [′GCGGCTGCGCTTTGCCCGGAAGCCCRTTTC |
| | (p.Ile198Val) | | | CATCATCGGTGAGTCATGCCT′] |
| 4533 | NM_000218.2(KCNQ1): c.652A > G | 3784 | KCNQ1 | [′CATGGTGGTCCTCTGCGTGGGCTCCRAGGG |
| | (p.Lys218Glu) | | | GCAGGTGTTTGCCACGTCGGC′] |
| 4534 | NM_000218.2(KCNQ1): c.820A > G | 3784 | KCNQ1 | [′CCTGTACATCGGCTTCCTGGGCCTCRTCTT |
| | (p.Ile274Val) | | | CTCCTCGTACTTTGTGTACCT′] |
| | NM_000218.2(KCNQ1): c.842A > G | 3784 | KCNQ1 | [] |
| | (p.Tyr281Cys) | | | |
| | NM_000218.2(KCNQ1): c.931A > G | 3784 | KCNQ1 | [] |
| | (p.Thr311Ala) | | | |
| | NM_000218.2(KCNQ1): c.950A > G | 3784 | KCNQ1 | [] |
| | (p.Asp317Gly) | | | |
| | NM_000238.3(KCNH2): c.1205A > | 3757 | KCNH2 | [] |
| | G (p.His402Arg) | | | |
| | NM_000238.3(KCNH2): c.1259A > | 3757 | KCNH2 | [] |
| | G (p.Tyr420Cys) | | | |
| 4535 | NM_000238.3(KCNH2): c.1280A > | 3757 | KCNH2 | [′ATCTACACGGCTGTCTTCACACCCTVCTCG |
| | G (p.Tyr427Cys) | | | GCTGCCTTCCTGCTGAAGGAG′] |
| | NM_000238.3(KCNH2): c.128A > G | 3757 | KCNH2 | [] |
| | (p.Tyr43Cys) | | | |
| | NM_000238.3(KCNH2): c.1424A > | 3757 | KCNH2 | [] |
| | G (p.Tyr475Cys) | | | |
| 4536 | NM_000238.3(KCNH2): c.1478A > | 3757 | KCNH2 | [′CACCCCGGCCGCATCGCCGTCCACTNCTTC |
| | G (p.Tyr493Cys) | | | AAGGGCTGGTTCCTCATCGAC′] |
| | NM_000238.3(KCNH2): c.1502A > | 3757 | KCNH2 | [] |
| | G (p.Asp501Gly) | | | |
| 4537 | NM_000238.3(KCNH2): c.1685A > | 3757 | KCNH2 | [′ATGTGCACCTTTGCGCTCATCGCGCVCTGG |
| | G (p.His562Arg) | | | CTAGCCTGCATCTGGTACGCC′] |
| 4538 | NM_000238.3(KCNH2): c.1711A > | 3757 | KCNH2 | [′CTGGCTAGCCTGCATCTGGTACGCCVTCGG |
| | G (p.Ile571Val) | | | CAACATGGAGCAGCCACACAT′] |
| 4539 | NM_000238.3(KCNH2): c.1720A > | 3757 | KCNH2 | [′CTGCATCTGGTACGCCATCGGCAACVTGG |
| | G (p.Met574Val) | | | AGCAGCCACACATGGACTCACG′] |
| | NM_000238.3(KCNH2): c.1724A > | 3757 | KCNH2 | [] |
| | G (p.Glu575Gly) | | | |
| 4540 | NM_000238.3(KCNH2): c.173A > G | 3757 | KCNH2 | [′GAGCTGTGCGGCTACTCGCGGGCCGVGGT |
| | (p.Glu58Gly) | | | GATGCAGCGACCCTGCACCTGC′] |
| | NM_000238.3(KCNH2): c.1747A > | 3757 | KCNH2 | [] |
| | G (p.Ile583Val) | | | |
| | NM_000238.3(KCNH2): c.1762A > | 3757 | KCNH2 | [] |
| | G (p.Asn588Asp) | | | |
| | NM_000238.3(KCNH2): c.1777A > | 3757 | KCNH2 | [] |
| | G (p.Ile593Val) | | | |
| | NM_000238.3(KCNH2): c.1783A > | 3757 | KCNH2 | [] |
| | G (p.Lys595Glu) | | | |
| | NM_000238.3(KCNH2): c.1790A > | 3757 | KCNH2 | [] |
| | G (p.Tyr597Cys) | | | |
| | NM_000238.3(KCNH2): c.1826A > | 3757 | KCNH2 | [] |
| | G (p.Asp609Gly) | | | |
| | NM_000238.3(KCNH2): c.1847A > | 3757 | KCNH2 | [] |
| | G (p.Tyr616Cys) | | | |
| | NM_000238.3(KCNH2): c.1885A > | 3757 | KCNH2 | [] |
| | G (p.Asn629Asp) | | | |
| 4541 | NM_000238.3(KCNH2): c.1886A > | 3757 | KCNH2 | [′AGCCTCACCAGTGTGGGCTTCGGCANCGT |
| | G (p.Asn629Ser) | | | CTCTCCCAACACCAACTCAGAG′] |
| | NM_000238.3(KCNH2): c.1897A > | 3757 | KCNH2 | [] |
| | G (p.Asn633Asp) | | | |
| 4542 | NM_000238.3(KCNH2): c.1898A > | 3757 | KCNH2 | [′GTGGGCTTCGGCAACGTCTCTCCCADCACC |
| | G (p.Asn633Ser) | | | AACTCAGAGAAGATCTTCTCC′] |
| | NM_000238.3(KCNH2): c.1903A > | 3757 | KCNH2 | [] |
| | G (p.Asn635Asp) | | | |
| | NM_000238.3(KCNH2): c.1910A > | 3757 | KCNH2 | [] |
| | G (p.Glu637Gly) | | | |
| | NM_000238.3(KCNH2): c.1912A > | 3757 | KCNH2 | [] |
| | G (p.Lys638Glu) | | | |
| 4543 | NM_000238.3(KCNH2): c.1933A > | 3757 | KCNH2 | [′AGAGAAGATCTTCTCCATCTGCGTCDTGCT |
| | G (p.Met645Val) | | | CATTGGCTGTGAGTGTGCCCA′] |
| | NM_000238.3(KCNH2): c.209A > G | 3757 | KCNH2 | [] |
| | (p.His70Arg) | | | |
| 4544 | NM_000238.3(KCNH2): c.2131A > | 3757 | KCNH2 | [′GCACGCCTGGTCCTACACCAACGGCRTCG |
| | G (p.Ile711Val) | | | ACATGAACGCGGTGAGGCCACC′] |
| | NM_000238.3(KCNH2): c.2266A > | 3757 | KCNH2 | [] |
| | G (p.Met756Val) | | | |
| | NM_000238.3(KCNH2): c.2510A > | 3757 | KCNH2 | [] |
| | G (p.Asp837Gly) | | | |
| | NM_000238.3(KCNH2): c.2591A > | 3757 | KCNH2 | [] |
| | G (p.Asp864Gly) | | | |
| | NM_000238.3(KCNH2): c.286A > G | 3757 | KCNH2 | [] |
| | (p.Ile96Val) | | | |
| 4545 | NM_000238.3(KCNH2): c.301A > G | 3757 | KCNH2 | [′CAAAGTGGAAATCGCCTTCTACCGGDAAG |
| | (p.Lys101Glu) | | | ATGGTAGGAGCGGGCCGGGGCG′] |
| 4546 | NM_000238.3(KCNH2): c.3118A > | 3757 | KCNH2 | [′TCGGCGGCCCCGGGGCGACGTGGAGRGCA |
| | G (p.Ser1040Gly) | | | GGCTGGATGCCCTCCAGCGCCA′] |
| | NM_000238.3(KCNH2): c.3233A > | 3757 | KCNH2 | [] |
| | G (p.Tyr1078Cys) | | | |
| | NM_000238.3(KCNH2): c.3343A > | 3757 | KCNH2 | [] |
| | G (p.Met1115Val) | | | |
| | NM_000238.3(KCNH2): c.652A > G | 3757 | KCNH2 | [] |
| | (p.Met218Val) | | | |
| | NM_000238.3(KCNH2): c.82A > G | 3757 | KCNH2 | [] |
| | (p.Lys28Glu) | | | |
| | NM_000891.2(KCNJ2): c.220A > G | 3759 | KCNJ2 | [] |
| | (p.Thr74Ala) | | | |
| | NM_000891.2(KCNJ2): c.223A > G | 3759 | KCNJ2 | [] |
| | (p.Thr75Ala) | | | |
| | NM_000891.2(KCNJ2): c.233A > G | 3759 | KCNJ2 | [] |
| | (p.Asp78Gly) | | | |
| | NM_000891.2(KCNJ2): c.574A > G | 3759 | KCNJ2 | [] |
| | (p.Thr192Ala) | | | |
| 4547 | NM_000891.2(KCNJ2): c.913A > G | 3759 | KCNJ2 | [′CATACTGGAAGGCATGGTGGAAGCCVCTG |
| | (p.Thr305Ala) | | | CCATGACGACACAGTGCCGTAG′] |
| | NM_172201.1(KCNE2): c.269A > G | 9992 | KCNE2 | [] |
| | (p.Glu90Gly) | | | |
| 4548 | NM_172201.1(KCNE2): c.281A > G | 9992 | KCNE2 | [′CAGTACATTGTAGAGGACTGGCAGGRAAA |
| | (p.Glu94Gly) | | | GTACAAGAGCCAAATCTTGAAT′] |
| | NM_000335.4(SCN5A): c.1217A > G | 6331 | SCN5A | [] |
| | (p.Asn406Ser) | | | |
| | NM_000335.4(SCN5A): c.1502A > G | 6331 | SCN5A | [] |
| | (p.Asp501Gly) | | | |
| | NM_000335.4(SCN5A): c.2249A > G | 6331 | SCN5A | [] |
| | (p.Gln750Arg) | | | |
| | NM_198056.2(SCN5A): c.2527A > G | 6331 | SCN5A | [] |
| | (p.Thr843Ala) | | | |
| | NM_000335.4(SCN5A): c.2780A > G | 6331 | SCN5A | [] |
| | (p.Asn927Ser) | | | |
| | NM_000335.4(SCN5A): c.3164A > G | 6331 | SCN5A | [] |
| | (p.Asp1055Gly) | | | |
| | NM_000335.4(SCN5A): c.343A > G | 6331 | SCN5A | [] |
| | (p.Ser115Gly) | | | |
| | NM_000335.4(SCN5A): c.3755A > G | 6331 | SCN5A | [] |
| | (p.Glu1252Gly) | | | |
| 4549 | NM_000335.4(SCN5A): c.376A > G | 6331 | SCN5A | [′AAAGGATATGAGTGAACCAGAATCTYCAC |
| | (p.Lys126Glu) | | | AGCCGCTCTCCGGATGGGGTGG′] |
| 4550 | NM_198056.2(SCN5A): c.4000A > G | 6331 | SCN5A | [′TGCCCTGGTGGGCGCCATCCCGTCCRTCAT |
| | (p.Ile1334Val) | | | GAACGTCCTCCTCGTCTGCCT′] |
| | NM_000335.4(SCN5A): c.4223A > G | 6331 | SCN5A | [] |
| | (p.Tyr1408Cys) | | | |
| | NM_000335.4(SCN5A): c.4252A > G | 6331 | SCN5A | [] |
| | (p.Lys1418Glu) | | | |
| | NM_000335.4(SCN5A): c.4291A > G | 6331 | SCN5A | [] |
| | (p.Arg1431Gly) | | | |
| | NM_198056.2(SCN5A): c.4346A > G | 6331 | SCN5A | [] |
| | (p.Tyr1449Cys) | | | |
| | NM_000335.4(SCN5A): c.4412A > G | 6331 | SCN5A | [] |
| | (p.Asn1471Ser) | | | |
| 4551 | NM_198056.2(SCN5A): c.4478A > G | 6331 | SCN5A | [′ATCTTCATGACAGAGGAGCAGAAGARGTA |
| | (p.Lys1493Arg) | | | CTACAATGCCATGAAGAAGCTG′] |
| | NM_000335.4(SCN5A): c.4489A > G | 6331 | SCN5A | [] |
| | (p.Met1497Val) | | | |
| | NM_000335.4(SCN5A): c.4577A > G | 6331 | SCN5A | [] |
| | (p.Lys1526Arg) | | | |
| 4552 | NM_198056.2(SCN5A): c.4978A > G | 6331 | SCN5A | [′GATGTCCCTGCCTGCCCTCTTCAACRTCGG |
| | (p.Ile1660Val) | | | GCTGCTGCTCTTCCTCGTCAT′] |
| | NM_000335.4(SCN5A): c.5138A > G | 6331 | SCN5A | [] |
| | (p.Asp1713Gly) | | | |
| | NM_000335.4(SCN5A): c.5161A > G | 6331 | SCN5A | [] |
| | (p.Asn1721Asp) | | | |
| | NM_000335.4(SCN5A): c.5297A > G | 6331 | SCN5A | [] |
| | (p.Tyr1766Cys) | | | |
| | NM_198056.2(SCN5A): c.5302A > G | 6331 | SCN5A | [] |
| | (p.Ile1768Val) | | | |
| | NM_000335.4(SCN5A): c.5317A > G | 6331 | SCN5A | [] |
| | (p.Asn1773Asp) | | | |
| | NM_000335.4(SCN5A): c.5318A > G | 6331 | SCN5A | [] |
| | (p.Asn1773Ser) | | | |
| | NM_000335.4(SCN5A): c.5366A > G | 6331 | SCN5A | [] |
| | (p.Asp1789Gly) | | | |
| | NM_000335.4(SCN5A): c.5402A > G | 6331 | SCN5A | [] |
| | (p.Asp1801Gly) | | | |
| | NM_000335.4(SCN5A): c.5513A > G | 6331 | SCN5A | [] |
| | (p.Asp1838Gly) | | | |
| | NM_198056.2(SCN5A): c.5726A > G | 6331 | SCN5A | [] |
| | (p.Gln1909Arg) | | | |
| 4553 | NM_000335.4(SCN5A): c.688A > G | 6331 | SCN5A | [′CCGAGTCCTCCGGGCCCTGAAAACTRTATC |
| | (p.Ile230Val) | | | AGTCATTTCAGGTGAAAATCA′] |
| | NM_000335.4(SCN5A): c.715A > G | 6331 | SCN5A | [] |
| | (p.Ile239Val) | | | |
| | NM_000335.4(SCN5A): c.89A > G | 6331 | SCN5A | [] |
| | (p.Glu30Gly) | | | |
| 4554 | NM_000383.3(AIRE): c.254A > G | 326 | AIRE | [′TTCTGGAGGGTGCTGTTCAAGGACTRCAAC |
| | (p.Tyr85Cys) | | | CTGGAGCGCTATGGCCGGCTG′] |
| 4555 | NM_006920.4(SCN1A): c.1876A > G | 6323 | SCN1A | [′ACGCAACAGCAACCTGAGTCAGACCRGTA |
| | (p.Ser626Gly) | | | GGTCATCCCGGATGCTGGCAGT′] |
| 4556 | NM_006920.4(SCN1A): c.4352A > G | −1 | — | [′GAAGAAAGTCTGTACATGTATCTTTRCTTT |
| | (p.Tyr1451Cys) | | | GTTATTTTCATCATCTTTGGG′] |
| 4557 | NM_000165.4(GJA1): c.617A > G | 2697 | GJA1 | [′TGTTTCCTCTCTCGCCCCACGGAGARAACC |
| | (p.Lys206Arg) | | | ATCTTCATCATCTTCATGCTG′] |
| 4558 | NM_000833.4(GRIN2A): c.1123 − | 2903 | GRIN2A | [′AGCTGTGTCTTTGTGTTTGTGCTGCRGGTG |
| | 2A > G | | | GGCAAGTGGGAGAACCATACG′] |
| 4559 | NC_000007.14: g.62535490A > G | −1 | — | [′GGAGAGTTTTGAGGCCTGTGGTTGARATG |
| | | | | GAAATATCTTCACAGAAAAACT′] |
| 4560 | NM_004595.4(SMS): c.983A > G | 6611 | SMS | [′AATCTGACAGAAGCACTGTCGCTCTVTGA |
| | (p.Tyr328Cys) | | | AGAACAGCTGGGGCGCCTGTAT′] |
| 4561 | NM_001256864.1(DNAJC6): c.801 − | 9829 | DNAJC6 | [′CAAGAGAGTGCCAACCTTCTGTTTCRGATA |
| | 2A > G | | | CCTGGGCTATATGTGTGACCT′] |
| 4562 | NM_001204316.1(PRLR): c.635A > | 5618 | PRLR | [′GTCCAGGTTCGCTGCAAACCAGACCRTGG |
| | G (p.His212Arg) | | | ATACTGGAGTGCATGGAGTCCA′] |
| 4563 | NM_012243.2(SLC35A3): c.886A > | 23443 | SLC35A3 | [′TTGGCTTCAAGATTTTGTGCCAACCRGGTA |
| | G (p.Ser296Gly) | | | AAATGTTCTTTTCTATTTTTT′] |
| 4564 | NM_000179.2(MSH6): c.3439 − | 2956 | MSH6 | [′AAAGACCTTTTCCTCCCTCATTCACRGGCT |
| | 2A > G | | | GGCTTATTAGCTGTAATGGCC′] |
| 4565 | NM_000249.3(MLH1): c.113A > G | 4292 | MLH1 | [′AATGCTATCAAAGAGATGATTGAGARCTG |
| | (p.Asn38Ser) | | | GTACGGAGGGAGTCGAGCCGGG′] |
| 4566 | NM_000249.3(MLH1): c.122A > G | 4292 | MLH1 | [′TTTTCTGTTTGATTTGCCAGTTTAGRTGCA |
| | (p.Asp41Gly) | | | AAATCCACAAGTATTCAAGTG′] |
| 4567 | NM_000249.3(MLH1): c.1559 − | 4292 | MLH1 | [′TTTTTGGTTTTATTTTTTGTTTTGCNGTTCT |
| | 2A > G | | | CCGGGAGATGTTGCATAACC′] |
| 4568 | NM_000249.3(MLH1): c.1990 − | 4292 | MLH1 | [′TTGAGGTATTGAATTTCTTTGGACCRGGTG |
| | 2A > G | | | AATTGGGACGAAGAAAAGGAA′] |
| 4569 | NM_000249.3(MLH1): c.208 − 2A > G | 4292 | MLH1 | [′TTTACTCATCTTTTTGGTATCTAACVGAAA |
| | | | | GAAGATCTGGATATTGTATGT′] |
| 4570 | NM_000249.3(MLH1): c.544A > G | 4292 | MLH1 | [′TGGGAAAATTTTGGAAGTTGTTGGCRGGT |
| | (p.Arg182Gly) | | | ACAGTCCAAAATCTGGGAGTGG′] |
| 4571 | NM_000249.3(MLH1): c.545 + 3A > | 4292 | MLH1 | [′AAAATTTTGGAAGTTGTTGGCAGGTRCAGT |
| | G | | | CCAAAATCTGGGAGTGGGTCT′] |
| 4572 | NM_000249.3(MLH1): c.546 − 2A > G | 4292 | MLH1 | [′TCTTACTCTTTTGTTTTTCTTTTCCVGGTAT |
| | | | | TCAGTACACAATGCAGGCAT′] |
| 4573 | NM_000249.3(MLH1): c.589 − 2A > G | 4292 | MLH1 | [′TTGTGTCTTCTGCTGTTTGTTTATCRGCAAG |
| | | | | GAGAGACAGTAGCTGATGTT′] |
| 4574 | NM_000249.3(MLH1): c.677 + 3A > | 4292 | MLH1 | [′GATTTTTTTATATAGGTTATCGACABACCG |
| | G | | | ACTAACAGCATTTCCAAAGAT′] |
| 4575 | NM_000249.3(MLH1): c.791 − 2A > G | 4292 | MLH1 | [′ACTGGTTGCTTTCTTTTTATTGTTTRGATCG |
| | | | | TCTGGTAGAATCAACTTCCT′] |
| 4576 | NM_000249.3(MLH1): c.883A > G | 4292 | MLH1 | [′AAACACACACCCATTCCTGTACCTCVGGTA |
| | (p.Ser295Gly) | | | ATGTAGCACCAAACTCCTCAA′] |
| 4577 | NM_000249.3(MLH1): c.884 + 4A > | 4292 | MLH1 | [′CACACCCATTCCTGTACCTCAGGTARTGTA |
| | G | | | GCACCAAACTCCTCAACCAAG′] |
| 4578 | NM_000251.2(MSH2): c.1277 − | 4436 | MSH2 | [′TTTGTTTGTTTTACTACTTTCTTTTVGGAAA |
| | 2A > G | | | ACACCAGAAATTATTGTTGG′] |
| 4579 | NM_000251.2(MSH2): c.1511 − | 4436 | MSH2 | [′CTTTTTCTTTTCTTCTTGATTATCARGGCTT |
| | 2A > G | | | GGACCCTGGCAAACAGATTA′] |
| 4580 | NM_000251.2(MSH2): c.1660A > G | 4436 | MSH2 | [′GAAGAATGGTGTTAAATTTACCAACNGGT |
| | (p.Ser554Gly) | | | TTGCAAGTCGTTATTATATTTT′] |
| 4581 | NM_000535.5(PMS2): c.1A > G | 5395 | PMS2 | [′CCGAGGCGGATCGGGTGTTGCATCCDTGG |
| | (p.Met1Val) | | | AGCGAGCTGAGAGCTCGAGGTG′] |
| 4582 | NM_000535.5(PMS2): c.989 − 2A > G | 5395 | PMS2 | [′ATAAATATGTTTTCTTTTTTGCCTTRGAATG |
| | | | | CGTTGATATCAATGTTACTC′] |
| 4583 | NM_000059.3(BRCA2): c.426 − | 675 | BRCA2 | [′TAAGGGATTTGCTTTGTTTTATTTTRGTCCT |
| | 2A > G | | | GTTGTTCTACAATGTACACA′] |
| 4584 | NM_024876.3(ADCK4): c.857A > G | 79934 | ADCK4 | [′CAGCAGGAGCTGGCTTGGGAGTGTGRCTA |
| | (p.Asp286Gly) | | | CCGTCGTGAGGCGGCTTGTGCC′] |
| 4585 | NM_006005.3(WFS1): c.1385A > G | 7466 | WFS1 | [′TACACGCGCAGGGCCCTGGCCACCGRGGT |
| | (p.Glu462Gly) | | | CACCGCCGGCCTGCTATCGCTG′] |
| 4586 | NM_000019.3(ACAT1): c.472A > G | 38 | ACAT1 | [′GGCAGGTGGGATGGAGAGCATGTCCRATG |
| | (p.Asn158Asp) | | | TTCCATATGTAATGAACAGAGG′] |
| 4587 | NM_000050.4(ASS1): c.496 − 2A > G | 445 | ASS1 | [′TCCACCTGTGCTGTCTCTTTCCTGCRGCAA |
| | | | | CACGGGATTCCCATCCCGGTC′] |
| 4588 | NM_000117.2(EMD): c.450 − 2A > G | 2010 | EMD | [′CCCACTTGCTCCCCTCTTTTGCCTCRGGGA |
| | | | | ACGCCCCATGTACGGCCGGGA′] |
| 4589 | NM_000153.3(GALC): c.334A > G | 2581 | GALC | [′GCATAATGCATGTGGGAGGGCTCAGBGCC |
| | (p.Thr112Ala) | | | GTCTGAATAGAGGAGAGCAAAA′] |
| 4590 | NM_000155.3(GALT): c.905 − 2A > G | 2592 | GALT | [′CCCCACTGTCTCTCTTCTTTCTGTCRGGGG |
| | | | | CTCCCACAGGATCAGAGGCTG′] |
| 4591 | NM_000159.3(GCDH): c.542A > G | 2639 | GCDH | [′CTCCTGGGCTGCTTCGGGCTCACAGRGCCC |
| | (p.Glu181Gly) | | | AACAGCGGAAGTGACCCCAGC′] |
| 4592 | NM_000169.2(GLA): c.509A > G | −1 | — | [′TGGGGAGTAGATCTGCTAAAATTTGRTGGT |
| | (p.Asp170Gly) | | | TGTTACTGTGACAGTTTGGAA′] |
| 4593 | NM_000169.2(GLA): c.548 − 2A > G | −1 | — | [′TATTTTACCCATTGTTTTCTCATACRGGTTA |
| | | | | TAAGCACATGTCCTTGGCCC′] |
| 4594 | NM_000169.2(GLA): c.647A > G | −1 | — | [′TCATATCTGTTTTCACAGCCCAATTRTACA |
| | (p.Tyr216Cys) | | | GAAATCCGACAGTACTGCAAT′] |
| 4595 | NM_000232.4(SGCB): c.1A > G | 6443 | SGCB | [′GCTCGGCGGCGGCGGGCGCGGGAAGRTGG |
| | (p.Met1Val) | | | CGGCAGCGGCGGCGGCGGCTGC′] |
| 4596 | NM_000255.3(MUT): c.1445 − 2A > G | 4594 | MUT | [′TAAAATTTTTCTTTGGGAAATTACCRGGTT |
| | | | | CTGAAGTAATTGTTGGAGTAA′] |
| 4597 | NM_000277.1(PAH): c.533A > G | 5053 | PAH | [′AGTGGGCAGCCCATCCCTCGAGTGGDATA |
| | (p.Glu178Gly) | | | CATGGAGGAAGAAAAGAAAACA′] |
| 4598 | NM_000277.1(PAH): c.974A > G | 5053 | PAH | [′CAGATTGACTTTCCATTCCAGATTTRCTGG |
| | (p.Tyr325Cys) | | | TTTACTGTGGAGTTTGGGCTC] |
| 4599 | NM_000328.2(RPGR): c.155 − 2A > G | 6103 | RPGR | [′TGATTATTTCTTTTTCCCTCCTACCRGGAA |
| | | | | ATAATAAACTTTACATGTTTG′] |
| 4600 | NM_000350.2(ABCA4): c.4540 − | 24 | ABCA4 | [′ATTAACGTGGGTGTCTCATTGCCTCRGAGA |
| | 2A > G | | | ACACAGCGCAGCACGGAAATT′] |
| 4601 | NM_000350.2(ABCA4): c.67 − 2A > G | 24 | ABCA4 | [′TTCTCTCTTTTTGTTTTGTTTTTCCRGATTC |
| | | | | GCTTTGTGGTGGAACTCGTG′] |
| 4602 | NM_000487.5(ARSA): c.1108 − | 410 | ARSA | [′CCCCGTGACCCCTGACTCTGCCCCCRGAGC |
| | 2A > G | | | CCTCGGCAGTCTCTCTTCTTC′] |
| 4603 | NM_000489.4(ATRX): c.134 − 2A > G | 546 | ATRX | [′TAATGTTCTTTATTTCTTCTTTTTTRGATAA |
| | | | | AATCAGTGGTTCTGGAAGTA′] |
| 4604 | NM_000489.4(ATRX): c.536A > G | 546 | ATRX | [′TGCACTGCTTGTGGACAACAGGTCARTCAT |
| | (p.Asn179Ser) | | | TTTCAAAAAGATTCCATTTAT′] |
| 4605 | NM_000512.4(GALNS): c.1171A > | 2588 | GALNS | [′CTTCTATTACCGTGGCGACACGCTGRTGGC |
| | G (p.Met391Val) | | | GGCCACCCTCGGGCAGCACAA′] |
| 4606 | NM_000521.3(HEXB): c.1243 − | 3074 | HEXB | [′ATGTATTGCAATTTGTAACGTTAATRGCTT |
| | 2A > G | | | GCGCCGGGCACAATAGTTGAA′] |
| 4607 | NM_000531.5(OTC): c.238A > G | 5009 | OTC | [′ATAGTATTTGCCTTTATTGCAAGGGRAGTC |
| | (p.Lys80Glu) | | | CTTAGGCATGATTTTTGAGAA′] |
| 4608 | NM_000551.3(VHL): c.233A > G | 7428 | VHL | [′GAGCCCTCCCAGGTCATCTTCTGCARTCGC |
| | (p.Asn78Ser) | | | AGTCCGCGCGTCGTGCTGCCC′] |
| 4609 | NM_001848.2(COL6A1): c.805 − | 1291 | COL6A1 | [′CCAACCTTGACCTGTTTTGTGTTCCRGGGA |
| | 2A > G | | | GAACGAGGCAAGCCGGGGCTC′] |
| 4610 | NM_001918.3(DBT): c.773 − 2A > G | 1629 | DBT | [′AATGAATAACAATTTAATGCTTTTCRGGCT |
| | | | | TTCAAAAAGCAATGGTCAAGA′] |
| 4611 | NM_003482.3(KMT2D): c.5645 − | 8085 | KMT2D | [′TCAACAGTGTCCTTCATTCCCCCACRGAAC |
| | 2A > G | | | TGCCCAAGATGGAATCCAAGG′] |
| 4612 | NM_003494.3(DYSF): c.1398 − | 8291 | DYSF | [′CAGGCCCTCTCTGCTCCCTTGCTCTRGGGA |
| | 2A > G | | | CCGCCTGACTCACAATGACAT′] |
| 4613 | NM_004006.2(DMD): c.1332 − 9A > G | 1756 | DMD | [′AAGAGGTCATAATAGGCTTCTTTCAVATTT |
| | | | | TCAGTTTACATAGAGTTTTAA′] |
| 4614 | NM_004006.2(DMD): c.3432 + 3A > | 1756 | DMD | [′AGTGGGATCACATGTGCCAACAGGTRTAG |
| | G | | | ACAATCTCTTTCACTGTGGCTT′] |
| 4615 | NM_004006.2(DMD): c.6763 − 2A > G | 1756 | DMD | [′AAACGTTGTTGCATTTGTCTGTTTCRGTTA |
| | | | | CTGGTGGAAGAGTTGCCCCTG′] |
| 4616 | NM_004006.2(DMD): c.9224 + 61934A > | 1756 | DMD | [′AGCTGTGAATGCTTCATTCAGGCCCRAGTA |
| | G | | | AATATAGGAAGAGGTGTAGTG′] |
| 4617 | NM_004006.2(DMD): c.9225 − | 1756 | DMD | [′GCTGTGAATGCTTCATTCAGGCCCARGTAA |
| | 647A > G | | | ATATAGGAAGAGGTGTAGTGG′] |
| 4618 | NM_004006.2(DMD): c.9650 − 2A > G | 1756 | DMD | [′TGTTGCAATTTTCTTCTTCCTTTGTRGACCT |
| | | | | TTTCAAGCAAGTGGCAAGTT′] |
| 4619 | NM_015560.2(OPA1): c.983A > G | 4976 | OPA1 | [′GAGATGATGACACGTTCTCCAGTTAVGGT |
| | (p.Lys328Arg) | | | AAGAACATAGGCCGTCTCAGTG′] |
| 4620 | NM_144997.5(FLCN): c.1433 − | 201163 | FLCN | [′TTGCTCTGCCCCTGCCCTTCTCCCCRGTGG |
| | 2A > G | | | GCCCCACCATCCTGAATAAGA′] |
| 4621 | NM_144997.5(FLCN): c.250 − 2A > G | 201163 | FLCN | [′AGATTTACTTTTCCTTTTCATGGACRGGGC |
| | | | | TGCCGGTCACTTGCTGCAGGG′] |
| 4622 | NM_000146.3(FTL): c.1A > G | 2512 | FTL | [′GTTAGCTCCTTCTTGCCAACCAACCRTGAG |
| | (p.Met1Val) | | | CTCCCAGATTCGTCAGAATTA′] |
| 4623 | NM_024531.4(SLC52A2): c.914A > | 79581 | SLC52A2 | [′GTGCAGAGCTTTTCCTGCTTACCCTRCGGG |
| | G (p.Tyr305Cys) | | | CGTCTGGCCTACCACCTGGCT′] |
| 4624 | NM_001743.5(CALM2): c.293A > G | 805 | CALM2 | [′TACTAAATTTTTTGCTAGGATGGCADTGGC |
| | (p.Asn98Ser) | | | TATATTAGTGCTGCAGAACTT′] |
| 4625 | NM_014754.2(PTDSS1): c.1058A > | 9791 | PTDSS1 | [′ACACAGTGCAAGCGCGTAGGAACACRATG |
| | G (p.Gln353Arg) | | | CTGGGTGTTTGGGTGAGTAATC′] |
| 4626 | NM_052844.3(WDR34): c.1307A > | 89891 | WDR34 | [′GGACCAGCGCACAGCAAACAGATACYTGA |
| | G (p.Lys436Arg) | | | GGGAGAGCTGCAGCGAAGTCAA′] |
| 4627 | NM_001130010.2(C15orf41): c.281A > | 84529 | C15orf41 | [′TACTTCTGTTTTATAAAGGTGGACTVTGCG |
| | G (p.Tyr94Cys) | | | CCCTCATTAATGGCTCGGCTT′] |
| 4628 | NM_001290048.1(ATL3): c.521A > | 25923 | ATL3 | [′AATTTCATCCATTGCCAGACGACCGYATTC |
| | G (p.Tyr174Cys) | | | TGTGAAGAGCTTTAAAAAAGA′] |
| 4629 | NM_000531.5(OTC): c.1034A > G | 5009 | OTC | [′GTCATGGTGTCCCTGCTGACAGATTRCTCA |
| | (p.Tyr345Cys) | | | CCTCAGCTCCAGAAGCCTAAA′] |
| 4630 | NM_000531.5(OTC): c.122A > G | 5009 | OTC | [′AATAAAGTGCAGCTGAAGGGCCGTGRCCT |
| | (p.Asp41Gly) | | | TCTCACTCTAAAAAACTTTACC′] |
| 4631 | NM_000531.5(OTC): c.155A > G | 5009 | OTC | [′ACTCTAAAAAACTTTACCGGAGAAGRAAT |
| | (p.Glu52Gly) | | | TAAATATATGCTATGGCTATCA′] |
| 4632 | NM_000531.5(OTC): c.1A > G | 5009 | OTC | [′TCGTCCTTTACACAATTAAAAGAAGDTGCT |
| | (p.Met1Val) | | | GTTTAATCTGAGGATCCTGTT′] |
| 4633 | NM_000531.5(OTC): c.268A > G | 5009 | OTC | [′CTTAGGCATGATTTTTGAGAAAAGARGTA |
| | (p.Ser90Gly) | | | CTCGAACAAGATTGTCTACAGA′] |
| 4634 | NM_000531.5(OTC): c.277A > G | 5009 | OTC | [′GATTTTTGAGAAAAGAAGTACTCGARCAA |
| | (p.Thr93Ala) | | | GATTGTCTACAGAAACAGGTAA′] |
| 4635 | NM_000531.5(OTC): c.350A > G | 5009 | OTC | [′TGTTTTCTTACCACACAAGATATTCDTTTG |
| | (p.His117Arg) | | | GGTGTGAATGAAAGTCTCACG′] |
| 4636 | NM_000531.5(OTC): c.377A > G | 5009 | OTC | [′TTGGGTGTGAATGAAAGTCTCACGGRCAC |
| | (p.Asp126Gly) | | | GGCCCGGTTTGTAAATATTTTC′] |
| 4637 | NM_000531.5(OTC): c.387 − 2A > G | 5009 | OTC | [′GATTATCTTTTTCTTGGTTTGCCACNGTGT |
| | | | | ATTGTCTAGCATGGCAGATGC′] |
| 4638 | NM_000531.5(OTC): c.481A > G | 5009 | OTC | [′TAAAGAAGCATCCATCCCAATTATCRATG |
| | (p.Asn161Asp) | | | GGCTGTCAGATTTGTACCATCC′] |
| 4639 | NM_000531.5(OTC): c.482A > G | 5009 | OTC | [′AAAGAAGCATCCATCCCAATTATCARTGG |
| | (p.Asn161Ser) | | | GCTGTCAGATTTGTACCATCCT′] |
| 4640 | NM_000531.5(OTC): c.503A > G | 5009 | OTC | [′ATCAATGGGCTGTCAGATTTGTACCVTCCT |
| | (p.His168Arg) | | | ATCCAGATCCTGGCTGATTAC′] |
| 4641 | NM_000531.5(OTC): c.524A > G | 5009 | OTC | [′TACCATCCTATCCAGATCCTGGCTGDTTAC |
| | (p.Asp175Gly) | | | CTCACGCTCCAGGTTGGTTTA′] |
| 4642 | NM_000531.5(OTC): c.527A > G | 5009 | OTC | [′CATCCTATCCAGATCCTGGCTGATTRCCTC |
| | (p.Tyr176Cys) | | | ACGCTCCAGGTTGGTTTATTT] |
| 4643 | NM_000531.5(OTC): c.541 − 2A > G | 5009 | OTC | [′TCATCTCCTTCATCCCGTGCCTTTTRGGAA |
| | | | | CACTATAGCTCTCTGAAAGGT′] |
| 4644 | NM_000531.5(OTC): c.542A > G | 5009 | OTC | [′TCTCCTTCATCCCGTGCCTTTTAGGRACAC |
| | (p.Glu181Gly) | | | TATAGCTCTCTGAAAGGTCTT′] |
| 4645 | NM_000531.5(OTC): c.548A > G | 5009 | OTC | [′TCATCCCGTGCCTTTTAGGAACACTRTAGC |
| | (p.Tyr183Cys) | | | TCTCTGAAAGGTCTTACCCTC] |
| 4646 | NM_000531.5(OTC): c.595A > G | 5009 | OTC | [′CCTCAGCTGGATCGGGGATGGGAACRATA |
| | (p.Asn199Asp) | | | TCCTGCACTCCATCATGATGAG′] |
| 4647 | NM_000531.5(OTC): c.596A > G | 5009 | OTC | [′CTCAGCTGGATCGGGGATGGGAACARTAT |
| | (p.Asn199Ser) | | | CCTGCACTCCATCATGATGAGC′] |
| 4648 | NM_000531.5(OTC): c.613A > G | 5009 | OTC | [′TGGGAACAATATCCTGCACTCCATCRTGAT |
| | (p.Met205Val) | | | GAGCGCAGCGAAATTCGGAAT′] |
| 4649 | NM_000531.5(OTC): c.716A > G | 5009 | OTC | [′AAGTTGGCAGAGCAGTATGCCAAAGDGGT |
| | (p.Glu239Gly) | | | ATGCTCTTTACATGTAAAGCTA′] |
| 4650 | NM_000531.5(OTC): c.717 + 3A > G | 5009 | OTC | [′TGGCAGAGCAGTATGCCAAAGAGGTRTGC |
| | | | | TCTTTACATGTAAAGCTATTAT′] |
| 4651 | NM_000531.5(OTC): c.718 − 2A > G | 5009 | OTC | [′TTTAACCAGCGTGTTTATGTATGCTRGAAT |
| | | | | GGTACCAAGCTGTTGCTGACA′] |
| 4652 | NM_000531.5(OTC): c.788A > G | 5009 | OTC | [′CATGGAGGCAATGTATTAATTACAGRCAC |
| | (p.Asp263 Gly) | | | TTGGATAAGCATGGGACAAGAA′] |
| 4653 | NM_000531.5(OTC): c.790A > G | 5009 | OTC | [′TGGAGGCAATGTATTAATTACAGACRCTTG |
| | (p.Thr264Ala) | | | GATAAGCATGGGACAAGAAGA′] |
| 4654 | NM_000531.5(OTC): c.905A > G | 5009 | OTC | [′GCTGCCTCTGACTGGACATTTTTACDCTGC |
| | (p.His302Arg) | | | TTGCCCAGAAAGCCAGAAGAA′] |
| 4655 | NM_000531.5(OTC): c.929A > G | 5009 | OTC | [′CACTGCTTGCCCAGAAAGCCAGAAGRAGT |
| | (p.Glu310Gly) | | | GGATGATGAAGTCTTTTATTCT′] |
| 4656 | NM_000531.5(OTC): c.988A > G | 5009 | OTC | [′ACTAGTGTTCCCAGAGGCAGAAAACRGAA |
| | (p.Arg330Gly) | | | AGTGGACAATCATGGTAAGCAA′] |
| 4657 | NM_000322.4(PRPH2): c.422A > G | 5961 | PRPH2 | [′GGGCTCAAGAACGGCATGAAGTACTRCCG |
| | (p.Tyr141Cys) | | | GGACACAGACACCCCTGGCAGG′] |
| | NM_003590.4(CUL3): c.1207 − | 8452 | CUL3 | [] |
| | 26A > G | | | |
| | NM_003590.4(CUL3): c.1376A > G | 8452 | CUL3 | [] |
| | (p.Lys459Arg) | | | |
| | NM_003590.4(CUL3): c.1377 + 3A > | 8452 | CUL3 | [] |
| | G | | | |
| 4658 | NM_017415.2(KLHL3): c.232A > G | 26249 | KLHL3 | [′AGCCTGCAGCCCCTACTTCTGTGCGDTGTT |
| | (p.Met78Val) | | | CACAGGTATGGTGAGTGGCCA] |
| | NM_017415.2(KLHL3): c.926A > G | 26249 | KLHL3 | [] |
| | (p.Gln309Arg) | | | |
| 4659 | NM_005763.3(AASS): c.874A > G | 10157 | AASS | [′CTCACATCAGTATTAAAACGACTTAYGTA |
| | (p.Ile292Val) | | | GCGCTCCGGATGTTTGTCATAC′] |
| 4660 | NM_000203.4(IDUA): c.1874A > G | 3425 | IDUA | [′TCCTACCGAGTTCGAGCCCTGGACTRCTGG |
| | (p.Tyr625Cys) | | | GCCCGACCAGGCCCCTTCTCG′] |
| 4661 | NM_000546.5(TP53): c.736A > G | 7157 | TP53 | [′GTGTAACAGTTCCTGCATGGGCGGCVTGA |
| | (p.Met246Val) | | | ACCGGAGGCCCATCCTCACCAT] |
| 4662 | NM_194442.2(LBR): c.1639A > G | 3930 | LBR | [′GCCATGATGAGATCACCCAAGTAATYGGG |
| | (p.Asn547Asp) | | | GTGGCGAACAAAGCCCCACCAT′] |
| 4663 | NM_000090.3(COL3A1): c.2284 − | 1281 | COL3A1 | [′ATTAAAAAATATTTTTATTTCCTCTRGGGT |
| | 2A > G (p.Gly762_Lys779del) | | | CCTACTGGTCCTATTGGTCCT′] |
| 4664 | NM_000090.3(COL3A1): c.997 − | 1281 | COL3A1 | [′TCTTGAAATTGTATTTAATTTTTTCRGGGC |
| | 2A > G (p.Gly333_Lys350del+) | | | CCTCCTGGTCCTCCTGGAACT′] |
| 4665 | NM_000090.3(COL3A1): c.3418 − | 1281 | COL3A1 | [′CATTGTGATGTCATGATACTTTCTTDGGGA |
| | 2A > G | | | CCTGTTGGACCCAGTGGACCT′] |
| | (p.Arg1139_Gly1140insVSSTERY | | | |
| | YRSTCFRCLHFRKIFWHCDVMI | | | |
| | LSW) | | | |
| 4666 | NM_000090.3(COL3A1): c.997 − | 1281 | COL3A1 | [′AAAAGAGCTCTTGAAATTGTATTTARTTTT |
| | 10A > G (p.Pro332_Gly333insFFQ) | | | TTCAGGGCCCTCCTGGTCCTC′] |
| 4667 | NM_000090.3(COL3A1): c.1870 − | 1281 | COL3A1 | [′ACAGAGTGTATCATTATACTTTTCTDGGGG |
| | 2A > G (p.Gly624_Gln641del) | | | CCTGGTGGTGACAAAGGAGAC′] |
| 4668 | NM_000090.3(COL3A1): c.3202 − | 1281 | COL3A1 | [′CTTCTCAATTGAATGTTTTCATCTTRGGGC |
| | 2A > G (p.Gly1068_Pro1085del) | | | CCTGCTGGCCCTGCTGGTGCT′] |
| 4669 | NM_000090.3(COL3A1): c.1762 − | 1281 | COL3A1 | [′AGTAAATACCGACCACTTCTTCTTTRGGGT |
| | 2A > G (p.Gly588_Gln605del) | | | GCTCCTGGTAAGAATGGAGAA′] |
| 4670 | NM_003611.2(OFD1): c.935 + 706A > | 8481 | OFD1 | [′CTTTTTGGCAATAATGAAAAGGTAARTTGA |
| | G | | | TCAAGAGAGAGGAAATAGGCA′] |
| 4671 | NM_014740.3(EIF4A3): c.809A > G | 9775 | EIF4A3 | [′AGTGATGGTCAGTGTGTCGTAGAGGYCAC |
| | (p.Asp270Gly) | | | ACAGAGTGTCAAATTTCCACTC′] |
| 4672 | NM_001040436.2(YARS2): c.1303A > | 51067 | YARS2 | [′TTTGTTACTTGTTGGTGATTTATGCYGACT |
| | G (p.Ser435Gly) | | | CCGCCTTCTGTTATCATTCGA′] |
| 4673 | NM_000277.1(PAH): c.1157A > G | 5053 | PAH | [′ACTGTCACGGAGTTCCAGCCCCTCTRTTAC |
| | (p.Tyr386Cys) | | | GTGGCAGAGAGTTTTAATGAT′] |
| 4674 | NM_000277.1(PAH): c.812A > G | 5053 | PAH | [′TTCCACTGCACACAGTACATCAGACDTGG |
| | (p.His271Arg) | | | ATCCAAGCCCATGTATACCCCC′] |
| 4675 | NM_004820.3(CYP7B1): c.889A > G | 9420 | CYP7B1 | [′ATTGCCCAGAACATAGTTGGAATAGYGTT |
| | (p.Thr297Ala) | | | TGCCACAGAGGCCCAGAGAAAG′] |
| 4676 | NM_024301.4(FKRP): c.1A > G | 79147 | FKRP | [′CCAGCTAGCCCCAGACTTCGGCCCCRTGCG |
| | (p.Met1Val) | | | GCTCACCCGCTGCCAGGCTGC′] |
| 4677 | NM_001955.4(EDN1): c.271A > G | 1906 | EDN1 | [′GTATGGACTTGGAAGCCCTAGGTCCRAGA |
| | (p.Lys91Glu) | | | GAGCCTTGGAGAATTTACTTCC′] |
| 4678 | NM_198947.3(FAM111B): c.1879A > | 374393 | FAM111B | [′TAATGTATACTGTATGTTTACCCAARGAAG |
| | G (p.Arg627Gly) | | | TTTCCTATCAGAGGTTTGGAA′] |
| 4679 | NM_001282227.1(CECR1): c.1232A > | 51816 | CECR1 | [′GCCCATGAAGACCTCATAGAAATCAYAGG |
| | G (p.Tyr411Cys) | | | ACAAGCCTTTGGCACCAAACAT′] |
| 4680 | NM_033419.4(PGAP3): c.914A > G | 93210 | PGAP3 | [′TGATTCCTTCAGCAGGTACAGGCTGYCATC |
| | (p.Asp305Gly) | | | TTCCAGAAAGCTGTGGGCCAA′] |
| 4681 | NM_007294.3(BRCA1): c.135 − | 672 | BRCA1 | [′TGTTCTTTCTTTCTTTATAATTTATRGATTT |
| | 2A > G | | | TGCATGCTGAAACTTCTCAA′] |
| 4682 | NM_007294.3(BRCA1): c.4676 − | 672 | BRCA1 | [′AAATTAAACTTCTCCCATTCCTTTCRGAGG |
| | 2A > G | | | GAACCCCTTACCTGGAATCTG′] |
| 4683 | NM_015474.3(SAMHD1): c.1153A > | 25939 | SAMHD1 | [′GGAAATGACAATCAAGTTTCTTACAYTGT |
| | G (p.Met385Val) | | | ATCAATAATGTTGCCAACTTTG′] |
| 4684 | NM_015474.3(SAMHD1): c.1411 − | 25939 | SAMHD1 | [′TTTTGGAAGAGATTCATAGTCCTCCYGGAA |
| | 2A > G | | | AACACAAGACTCCCCATGTTA′] |
| 4685 | NM_000097.5(CPDX): c.980A > G | 1371 | CPDX | [′ACCAATGCCCCGCCGTTCTCCACGAYGGG |
| | (p.His327Arg) | | | CTATAAAGAAGTAATCATCACA′] |
| 4686 | NM_012338.3(TSPAN12): c.413A > | 23554 | TSPAN12 | [′AAGCCACCGATATCTAGGTAATCCAYAAT |
| | G (p.Tyr138Cys) | | | TTGTCATCCTGGCTTTCAAAGT′] |
| 4687 | NM_000406.2(GNRHR): c.94A > G | 2798 | GNRHR | [′GTCACTCGGATCTTTCCAGACAAGGYCAG |
| | (p.Thr32Ala) | | | AGTGGGGAGGTTGCCCTGCATC′] |
| 4688 | NM_199189.2(MATR3): c.1864A > | 9782 | MATR3 | [′TGGTTCCCAGAAGACTGAGAGTTCARCCG |
| | G (p.Thr622Ala) | | | AAGGTAAAGAACAAGAAGAGAA′] |
| 4689 | NM_003181.3(T): c.512A > G | 6862 | T | [′CTGTGGACCCCCAACTCTCACTATGYGGAT |
| | (p.His171Arg) | | | TCGAGGCTCATACTTATGCAA′] |
| 4690 | NM_000321.2(RB1): c.1927A > G | 5925 | RB1 | [′AGCCTTCCAGACCCAGAAGCCATTGRAAT |
| | (p.Lys643 Glu) | | | CTACCTCTCTTTCACTGTTTTA′] |
| 4691 | NM_002234.3(KCNA5): c.143A > G | 3741 | KCNA5 | [′GCTGGGCTCAGCGATGGGCCCAAGGRGCC |
| | (p.Glu48Gly) | | | GGCGCCAAAGGGGCGCGGCGCG′] |
| 4692 | NM_178014.3(TUBB): c.895A > G | 203068 | TUBB | [′CCAGCAGGTCTTCGATGCCAAGAACRTGA |
| | (p.Met299Val) | | | TGGCTGCCTGTGACCCCCGCCM |
| 4693 | NM_000136.2(FANCC): c.-78 − | 2176 | FANCC | [′TGCTTCTATTTGTTCCCTTTCTTACRGATTT |
| | 2A > G | | | AATGTGTGCCGACCATTTCC′] |
| 4694 | NM_000546.5(TP53): c.488A > G | 7157 | TP53 | [′CTCCGTCATGTGCTGTGACTGCTTGYAGAT |
| | (p.Tyr163Cys) | | | GGCCATGGCGCGGACGCGGGT′] |
| 4695 | NM_000546.5(TP53): c.659A > G | 7157 | TP53 | [′TTTCGACATAGTGTGGTGGTGCCCTVTGAG |
| | (p.Tyr220Cys) | | | CCGCCTGAGGTCTGGTTTGCA′] |
| 4696 | NM_000546.5(TP53): c.701A > G | 7157 | TP53 | [′GGCTCTGACTGTACCACCATCCACTRCAAC |
| | (p.Tyr234Cys) | | | TACATGTGTAACAGTTCCTGC′] |
| 4697 | NM_002878.3(RAD51D): c.1A > G | −1 | — | [′CACAGTCCGACCCTGAGCACGCCCAYGTT |
| | (p.Met1Val) | | | CCCCGCAGGCCGGAACAGCCCC′] |
| 4698 | NM_058216.2(RAD51C): c.706 − | 5889 | RAD51C | [′ATCTAATATTATCTCTTCTGTATTTRGGTTC |
| | 2A > G | | | GACTAGTGATAGTGGATGGT′] |
| 4699 | NM_015713.4(RRM2B): c.556A > G | 50484 | RRM2B | [′TCTACAGCAGCAAAGGCCACCACTCYTTC |
| | (p.Arg186Gly) | | | CCCTGGGAGACATAAAATCGTT′] |
| 4700 | NM_015713.4(RRM2B): c.581A > G | 50484 | RRM2B | [′AAAAGATCCTGAGAAGAAAACTCCTYCTA |
| | (p.Glu194Gly) | | | CAGCAGCAAAGGCCACCACTCT′] |
| 4701 | NM_000219.5(KCNE1): c.242A > G | 3753 | KCNE1 | [′CACTCGAACGACCCATTCAACGTCTDCATC |
| | (p.Tyr81Cys) | | | GAGTCCGATGCCTGGCAAGAG′] |
| 4702 | NM_000271.4(NPC1): c.1832A > G | 4864 | NPC1 | [′TTCACTGCTGAACGAAGTATTGAAGRTGA |
| | (p.Asp611Gly) | | | ACTAAATCGTGAAAGTGACAGT′] |
| 4703 | NM_000257.3(MYH7): c.1952A > G | 4625 | MYH7 | [′CTGGGGCTGTGTCCCACTCACCCTGYGCAG |
| | (p.His651Arg) | | | AGCTGACACAGTCTGAAAGGA′] |
| 4704 | NM_000540.2(RYR1): c.7043A > G | 6261 | RYR1 | [′GGGTGGCCAGGCGAGAGCGTGGAGGRGA |
| | (p.Glu2348Gly) | | | ACGCCAATGTGGTGGTGCGGCTG′] |
| 4705 | NM_058216.2(RAD51C): c.1027 − | 5889 | RAD51C | [′TTTGTATATATATTTTTTATCTTTCRGCCTC |
| | 2A > G | | | AGGGATTTAGAGATACTGTT′] |
| 4706 | NM_130838.1(UBE3A): c.1694 − | 7337 | UBE3A | [′TGTATTTTTAAAAATCATTTCTTATRGGTA |
| | 2A > G | | | TGTTCACATACGATGAATCTA′] |
| 4707 | NM_022168.3(IFIH1): c.1009A > G | 64135 | IFIH1 | [′TCCTTGGCAATGTAAACAGCCACTCYGGTT |
| | (p.Arg337Gly) | | | TTTCCACTCCCTGTAGGGAGG′] |
| 4708 | NM_022068.3(PIEZO2): c.2134A > | 63895 | PIEZO2 | [′GCCACACAGAACAGGAACAGCACCAYGTA |
| | G (p.Met712Val) | | | GATGATTTTGTACATTACGATT′] |
| 4709 | NM_001164342.2(ZBTB20): c.1787A > | 26137 | ZBTB20 | [′ACCGCCAAACAGAACTACGTCAAGCRCAT |
| | G (p.His596Arg) | | | GTTCGTACACACAGGTGAGTGT′] |
| 4710 | NM_001128159.2(VPS53): c.2084A > | 55275 | VPS53 | [′TGCCTGATACTACGTCCATCTCACCYGTTC |
| | G (p.Gln695Arg) | | | TGCTCCCACCATGCTAATTGG′] |
| 4711 | NM_003108.3(SOX11): c.347A > G | 6664 | SOX11 | [′AAGCACATGGCCGACTACCCCGACTRCAA |
| | (p.Tyr116Cys) | | | GTACCGGCCCCGGAAAAAGCCC′] |
| 4712 | NM_020435.3(GJC2): c.-170A > G | 57165 | GJC2 | [′TTCAGACCCTGAGGCCGAGGGGGGARCAA |
| | | | | TGGGGCCCTTGAGGGCCCCTCC′] |
| 4713 | NM_004817.3(TJP2): c.1992 − 2A > G | 9414 | TJP2 | [′GATTTACTTCCCGTGGTTTCTTCTCRGAGC |
| | | | | TGAACAAATGGCCAGTGTTCA′] |
| 4714 | NM_017565.3(FAM20A): c.720 − | −1 | — | [′GGTGTCTCCTCATCTCGCTGCTGTCYGGAA |
| | 2A > G | | | GGAAGGAAGGAATCACGCCCT′] |
| 4715 | NM_002764.3(PRPS1): c.343A > G | 5631 | PRPS1 | [′AATCTCAGCCAAGCTTGTTGCAAATRTGCT |
| | (p.Met115Val) | | | ATCTGTAGCAGGTGCAGATCA′] |
| 4716 | NM_000216.2(ANOS1): c.1A > G | 3730 | ANOS1 | [′TCGCCCTCGCCCTCGACCCGCAGCCRTGGT |
| | (p.Met1Val) | | | GCCCGGGGTGCCCGGCGCGGT′] |
| 4717 | NM_031229.2(RBCK1): c.1160A > | 10616 | RBCK1 | [′TGGTGCTTCTTTGAGGATGATGTCARTGAG |
| | G (p.Asn387Ser) | | | TTCACCTGCCCTGTGTGTTTC′] |
| 4718 | NM_015599.2(PGM3): c.737A > G | 5238 | PGM3 | [′CACAAAGTCAGCTCCACATAAATGAYTGA |
| | (p.Asn246Ser) | | | GTTTGCCCTTGGACCCATCATT′] |
| 4719 | NM_015599.2(PGM3): c.1352A > G | 5238 | PGM3 | [′TTTCTCTCACACCTGAACTTTAAGTYGTCT |
| | (p.Gln451Arg) | | | GTTTGGAAGATCTGTATAGAG′] |
| 4720 | NM_000535.5(PMS2): c.904 − 2A > G | 5395 | PMS2 | [′CTTTTCTACTCCTTGTATTTTGTGCRGGTCT |
| | | | | GCAGACTCGTGAATGAGGTC′] |
| 4721 | NM_000546.5(TP53): c.358A > G | 7157 | TP53 | [′GGGCTTCTTGCATTCTGGGACAGCCDAGTC |
| | (p.Lys120Glu) | | | TGTGACTTGCACGGTCAGTTG′] |
| 4722 | NM_000546.5(TP53): c.842A > G | 7157 | TP53 | [′CGTGTTTGTGCCTGTCCTGGGAGAGDCCGG |
| | (p.Asp281Gly) | | | CGCACAGAGGAAGAGAATCTC′] |
| 4723 | NM_001128425.1(MUTYH): c.1187 − | 4595 | MUTYH | [′CCCCTGCCTGGCTGCCCTCCCTCTCRGGTC |
| | 2A > G | | | TGCTGGCAGGACTGTGGGAGT′] |
| 4724 | NM_000546.5(TP53): c.1101 − 2A > G | 7157 | TP53 | [′TCTCCTCCCTGCTTCTGTCTCCTACRGCCAC |
| | | | | CTGAAGTCCAAAAAGGGTCA′] |
| 4725 | NM_000314.6(PTEN): c.493 − 2A > G | 5728 | PTEN | [′GGCTTCTCTTTTTTTTCTGTCCACCRGGGA |
| | | | | GTAACTATTCCCAGTCAGAGG′] |
| 4726 | NM_000051.3(ATM): c.3994 − 2A > G | 472 | ATM | [′ATATATTTTAATTTTGTGCCCTTGCRGATT |
| | | | | GATCACTTATTCATTAGTAAT′] |
| 4727 | NM_000314.6(PTEN): c.403A > G | 5728 | PTEN | [′TGGAAAGGGACGAACTGGTGTAATGRTAT |
| | (p.Ile135Val) | | | GTGCATATTTATTACATCGGGG′] |
| 4728 | NM_000249.3(MLH1): c.117 − 2A > G | 4292 | MLH1 | [′TAAATTATTTTCTGTTTGATTTGCCDGTTTA |
| | | | | GATGCAAAATCCACAAGTAT′] |
| 4729 | NM_025150.4(TARS2): c.695 + 3A > | 80222 | TARS2 | [′GGTCCAACAGCAACAGTATATGGGTRAGA |
| | G | | | GTTGTCAAGATTAAGGCAAACA′] |
| 4730 | NM_206933.2(USH2A): c.10544A > | 7399 | USH2A | [′TGGACCAAAATAGACAATCTTGAAGVTAC |
| | G (p.Asp3515Gly) | | | AATTGTCTTAAACTGGAGAAAA′] |
| 4731 | NM_000834.3(GRIN2B): c.1238A > | 2904 | GRIN2B | [′CATCTGAGCATTGTGACCCTGGAGGRGGC |
| | G (p.Glu413Gly) | | | ACCATTTGTCATTGTGGAAAGT′] |
| 4732 | NM_004830.3(MED23): c.3638A > | 9439 | MED23 | [′TGTAGCTATACGTTAGCTCTTGCACRTGCT |
| | G (p.His1213Arg) | | | GTGTGGCACCATTCTAGCATC′] |
| 4733 | NM_003159.2(CDKL5): c.125A > G | 6792 | CDKL5 | [′GAAACACATGAAATTGTGGCGATCARGAA |
| | (p.Lys42Arg) | | | ATTCAAGGACAGTGAAGGTAGA′] |
| 4734 | NM_003159.2(CDKL5): c.380A > G | 6792 | CDKL5 | [′CTAATCAAGGCTATTCACTGGTGCCRTAAG |
| | (p.His127Arg) | | | AATGATATTGTCCATCGAGGT′] |
| 4735 | NM_003159.2(CDKL5): c.578A > G | 6792 | CDKL5 | [′AGCGCTCCCTATGGAAAGTCCGTGGRCAT |
| | (p.Asp193Gly) | | | GTGGTCGGTGGGCTGTATTCTT′] |
| 4736 | NM_198282.3(TMEM173): c.461A < | 340061 | TMEM173 | [′TGACCATGCCAGCCCATGGGCCACGYTGA |
| | G (p.Asn154Ser) | | | AATTCCCTTTTTCACACACTGC′] |
| 4737 | NM_032018.6(SPRTN): c.350A > G | 83932 | SPRTN | [′CTCCTGCATGAAATGATACATGCCTRTTTA |
| | (p.Tyr117Cys) | | | TTTGTCACTAATAACGACAAA′] |
| 4738 | NM_001759.3(CCND2): c.838A > G | 894 | CCND2 | [′GGAGGATGAACTGGACCAAGCCAGCRCCC |
| | (p.Thr280Ala) | | | CTACAGACGTGCGGGATATCGA′] |
| 4739 | NM_007315.3(STAT1): c.854A > G | 6772 | STAT1 | [′AGGGTCATGTTCGTAGGTGTATTTCYGTTC |
| | (p.Gln285Arg) | | | CAATTCCTCCAACTTTTTAAG′] |
| 4740 | NM_139276.2(STAT3): c.1175A > G | 6774 | STAT3 | [′GTTGGATTCTTCCATGTTCATCACTYTTGT |
| | (p.Lys392Arg) | | | GTTTGTGCCCAGAATGTTAAA′] |
| 4741 | NM_001037811.2(HSD17B10): c.257A > | 3028 | HSD17B10 | [′GATGCCTGCACAGTTGACAGCTACAYCCA |
| | G (p.Asp86Gly) | | | CACGGCCAAACTTTCCTTTTGC′] |
| 4742 | NM_005726.5(TSFM): c.57 + 4A > G | 10102 | TSFM | [′CGCGCGGACCGGGAGCTACCCGGTGRGAA |
| | | | | GTCCTGGTGCTGGTACCGACCT′] |
| 4743 | NM_000166.5(GJB1): c.580A > G | 2705 | GJB1 | [′CGAGAAAACCGTCTTCACCGTCTTCRTGCT |
| | (p.Met194Val) | | | AGCTGCCTCTGGCATCTGCAT′] |
| 4744 | NM_001077494.3(NFKB2): c.2594A > | 4791 | NFKB2 | [′TTACCCCCAGCAGAGGTGAAGGAAGRCAG |
| | G (p.Asp865Gly) | | | TGCGTACGGGAGCCAGTCAGTG′] |
| 4745 | NC_012920.1: m.5559A > G | 4578 | MT-TW | [′TGTTACAGAAATTAAGTATTGCAACYTACT |
| | | | | GAGGGCTTTGAAGGCTCTTGG′] |
| 4746 | NC_012920.1: m.13514A > G | 4540 | MT-NDS | [′TTCCTCACAGGTTTCTACTCCAAAGRCCAC |
| | | | | ATCATCGAAACCGCAAACATA′] |
| 4747 | NM_007315.3(STAT1): c.2018A > G | 6772 | STAT1 | [′GTAATACTTTCCAAAGGCATGGTCTYTGTC |
| | (p.Lys673Arg) | | | AATATTTGGATACAGATACTT′] |
| 4748 | NM_007315.3(STAT1): c.1909A > G | 6772 | STAT1 | [′GGGAAAGTAACAGCAGAAAGTTCTTYCTT |
| | (p.Lys637 Glu) | | | CGTGTAGGGTTCAACCGCATGG′] |
| 4749 | NM_000060.3(BTD): c.683A > G | 686 | BTD | [′GCATTCGATGTTCCTCTTAAAGTGGRTCTC |
| | (p.Asp228Gly) | | | ATCACCTTTGATACCCCCTTT′] |
| 4750 | NM_004992.3(MECP2): c.27 − 2A > G | 4204 | MECP2 | [′TACTTACATACTTGTTTAACACTTCRGGGA |
| | | | | AGAAAAGTCAGAAGACCAGGA′] |
| 4751 | NM_004992.3(MECP2): c.378 − | 4204 | MECP2 | [′CTTGTGTCTTTCTGTTTGTCCCCACNGTCCC |
| | 2A > G | | | CAGGGAAAAGCCTTTCGCTC′] |
| 4752 | NM_003159.2(CDKL5): c.100 − | 6792 | CDKL5 | [′TTTCCTTCTGCTTCTTTTCCCTTGCRGGAAA |
| | 2A > G | | | CACATGAAATTGTGGCGATC′] |
| 4753 | NM_003159.2(CDKL5): c.464 − | 6792 | CDKL5 | [′ACAACTTTGGACTTTGCTATCTTTCRGGTT |
| | 2A > G | | | TTGCTCGTAATCTGTCAGAAG′] |
| 4754 | NM_003159.2(CDKL5): c.978 − | 6792 | CDKL5 | [′GATATACTTCTTTTGTTTTTAACATRGAAA |
| | 2A > G | | | CCAAGCCGGCAAAAGTACTGC′] |
| 4755 | NM_032492.3(JAGN1): c.485A > G | 84522 | JAGN1 | [′TTGGCAGTGCAAGTGCATGCCTGGCRGTTG |
| | (p.Gln162Arg) | | | TACTACAGCAAGAAGCTCCTA′] |
| 4756 | NM_178517.3(PIGW): c.499A > G | 284098 | PIGW | [′AACTGAGCTCTATGGGACAGGAGCARTGG |
| | (p.Met167Val) | | | ATTTTGGAGTAGGTGGCTTTGT′] |
| 4757 | NM_004387.3(NKX2-5): c.461A > G | 1482 | NKX2-5 | [′TCGCAGGCGCAGGTCTATGAGCTGGRGCG |
| | (p.Glu154Gly) | | | GCGCTTCAAGCAGCAGCGGTAC′] |
| 4758 | NM_005859.4(PURA): c.289A > G | 5813 | PURA | [′CGCCGAGGTGGGCGCGGGCGGCAACRAGA |
| | (p.Lys97Glu) | | | GCCGCCTTACTCTCTCCATGTC′] |
| 4759 | NM_004046.5(ATP5A1): c.962A > G | 498 | ATP5A1 | [′GCGGAGCAACAGAGACATCTGACGGHAAG |
| | (p.Tyr321Cys) | | | CAACAGCCTATGGTACAGAATA′] |
| 4760 | NM_000038.5(APC): c.1744 − 2A > G | 324 | APC | [′GATGACCCATATTCTGTTTCTTACTRGGAA |
| | | | | TCAACCCTCAAAAGCGTATTG′] |
| 4761 | NM_000751.2(CHRND): c.1319A > | 1144 | CHRND | [′TTCAATGAGCTGAAGCCAGCTGTGGWTGG |
| | G (p.Asp440Gly) | | | GGCAAACTTCATTGTTAACCAC′] |
| 4762 | NM_130466.3(UBE3B): c.1A > G | 89910 | UBE3B | [′GCAGGGTTTGTGCAAGTTTGCAAACRTGTT |
| | (p.Met1Val) | | | CACCCTGTCTCAGACCTCGAG′] |
| 4763 | NM_003159.2(CDKL5): c.211A > G | 6792 | CDKL5 | [′AATGCTTCGGACTCTCAAGCAGGAARACA |
| | (p.Asn7lAsp) | | | TTGTGGAGTTGAAGGAAGCATT′] |
| 4764 | NM_003159.2(CDKL5): c.404 − | 6792 | CDKL5 | [′AATTTTTTTTTTATCTTGACACTCCRGATAT |
| | 2A > G | | | AAAACCAGAAAATCTCTTAA′] |
| 4765 | NM_003159.2(CDKL5): c.449A > G | 6792 | CDKL5 | [′TTAATCAGCCACAATGATGTCCTAARACTG |
| | (p.Lys150Arg) | | | TGTGACTTTGGTAAGTTAAAA′] |
| 4766 | NM_001813.2(CENPE): c.4063A > G | 1062 | CENPE | [′ACTTCAAGGGCTTCTTTTATCGTTTYAAGG |
| | (p.Lys1355Glu) | | | TTGTCTCTTTCCTTGGTTAGA′] |
| 4767 | NM_023073.3(C5orf42): c.3290 − | 65250 | C5orf42 | [′ATTTTACCAAATTTTTGTATTTGATRGATC |
| | 2A > G | | | CCATTGAAGAGGAAGATGCAA′] |
| 4768 | NM_002977.3(SCN9A): c.2215A > G | −1 | — | [′GTGTTTAAAACTATGCAAATGGTAAYTGC |
| | (p.Ile739Val) | | | AAGATCTACAAAAGGATCCATT′] |
| 4769 | NM_002354.2(EPCAM): c.556 − | 4072 | EPCAM | [′TATTAGTATTAATTTGTATTATTCANTTTTT |
| | 14A > G | | | TTCCCCAGTATGAGAATAAT′] |
| 4770 | NM_002354.2(EPCAM): c.492 − | 4072 | EPCAM | [′TTAATACAGATTTTAAATTCTTTACRGTGC |
| | 2A > G | | | ACTTCAGAAGGAGATCACAAC′] |
| 4771 | NM_000053.3(ATP7B): c.122A > G | 540 | ATP7B | [′ATCCAGACCACCTTCATAGCCAACAYTGTC |
| | (p.Asn41Ser) | | | AAAAGCAAAACTCTTCTTCAT′] |
| 4772 | NM_022455.4(NSD1): c.4498 − | 64324 | NSD1 | [′ATGTGGGACATTATTTTTTCTTTGCRAGGG |
| | 3A > G | | | AGAACTAATGCCTCACAGGAC′] |
| 4773 | NM_022455.4(NSD1): c.5893 − | 64324 | NSD1 | [′TAAGTCAGGAGGTATTTCTTGTTCTRGGGT |
| | 2A > G | | | GAATTTGTGAATGAGTATGTG′] |
| 4774 | NM_022455.4(NSD1): c.6059A > G | 64324 | NSD1 | [′AAAGGAAACTATGCTCGGTTCATGARTCA |
| | (p.Asn2020Ser) | | | TTGCTGCCAGCCCAACTGTGAA′] |
| 4775 | NM_022455.4(NSD1): c.6356A > G | 64324 | NSD1 | [′GGTGAAATCACAAAGGAGCGAGAAGRTGA |
| | (p.Asp2119Gly) | | | GTGTTTTAGTTGTGGGGATGCT′] |
| 4776 | NM_133433.3(NIPBL): c.737A > G | 25836 | NIPBL | [′AATCCTAGACATGGTTCAAGTGAGGRCTA |
| | (p.Asp246 Gly) | | | CCTACACATGGTGCACAGGCTA′] |
| 4777 | NM_133433.3(NIPBL): c.5428 − | 25836 | NIPBL | [′TGTTTTTTTCTCTTCATTTTTCTTTRGCTTG |
| | 2A > G | | | ATATGCAACGAGGTGTTCAT′] |
| 4778 | NM_005249.4(FOXG1): c.757A > G | 2290 | FOXG1 | [′CCACTACGACGACCCGGGCAAGGGCRACT |
| | (p.Asn253Asp) | | | ACTGGATGCTGGACCCGTCGAG′] |
| 4779 | NM_004380.2(CREBBP): c.4508A > | 1387 | CREBBP | [′AAGCCAAAACGACTGCAGGAGTGGTRCAA |
| | G (p.Tyr1503Cys) | | | AAAGATGCTGGACAAGGCGTTT′] |
| 4780 | NM_004380.2(CREBBP): c.3983 − | 1387 | CREBBP | [′CTCACCTGCTCCTTCTGGACTTCCTRGGGC |
| | 2A > G | | | TGCAGACCACAAGACTGGGAA′] |
| 4781 | NM_001083962.1(TCF4): c.991 − | 6925 | TCF4 | [′TTTTTTTTTTCTCCTTATTGTTTTARGATCT |
| | 2A > G | | | ATTCTCCAGATCACACTAAC′] |
| 4782 | NM_178151.2(DCX): c.1027 − 2A > G | 1641 | DCX | [′TTAACTTTGTCTCTTCTCTTCTTATRGGACC |
| | | | | TGTACCTGCCTCTGTCCTTG′] |
| 4783 | NM_178151.2(DCX): c.607A > G | 1641 | DCX | [′TGTGCGTGTGCTTCTGAACAAGAAGRCAG |
| | (p.Thr203Ala) | | | CCCACTCTTTTGAGCAAGTCCT′] |
| 4784 | NM_178151.2(DCX): c.538A > G | 1641 | DCX | [′GGAGAACAAGGACTTTGTGCGCCCCRAGC |
| | (p.Lys180Glu) | | | TGGTTACCATCATCCGCAGTGG′] |
| 4785 | NM_178151.2(DCX): c.520A > G | 1641 | DCX | [′CAACAGTGCACAGGCCAGGGAGAACRAGG |
| | (p.Lys174Glu) | | | ACTTTGTGCGCCCCAAGCTGGT′] |
| 4786 | NM_178151.2(DCX): c.451A > G | 1641 | DCX | [′CAATCCCAACTGGTCTGTCAACGTADAAA |
| | (p.Lys151Glu) | | | CATCTGCCAATATGAAAGCCCC′] |
| 4787 | NM_178151.2(DCX): c.413A > G | 1641 | DCX | [′GACAACTTCTTTAAAAAGGTGGAGTRCAC |
| | (p.Tyr138Cys) | | | CAAGAATGTCAATCCCAACTGG′] |
| 4788 | NM_000252.2(MTM1): c.301A > G | 4534 | MTM1 | [′AATTGAAAAAATGGGAGGCGCGACARGTA |
| | (p.Ser101Gly) | | | GAGGAGAAAATTCCTATGGTCT′] |
| 4789 | NM_000252.2(MTM1): c.343 − | 4534 | MTM1 | [′ACTGTCATACTTCTCCTTTGCCCCCRGGAC |
| | 2A > G | | | ATGAGAAACCTGAGGTTCGCT′] |
| 4790 | NM_000252.2(MTM1): c.529 − | 4534 | MTM1 | [′GACTTGAATTTCTTTTTTTCCTCACRGGGCT |
| | 2A > G | | | TGCCCAATCACCATTGGAGA′] |
| 4791 | NM_000252.2(MTM1): c.550A > G | 4534 | MTM1 | [′ACAGGGCTTGCCCAATCACCATTGGRGAA |
| | (p.Arg184Gly) | | | TAACTTTTATTAATAAGTGCTA′] |
| 4792 | NM_000252.2(MTM1): c.629A > G | 4534 | MTM1 | [′TTGGTGGTTCCGTATCGTGCCTCAGRTGAT |
| | (p.Asp210Gly) | | | GACCTCCGGAGAGTTGCAACT′] |
| 4793 | NM_000252.2(MTM1): c.1406A > G | 4534 | MTM1 | [′CAATTTTTGATTATAATTTTGGATCRTCTGT |
| | (p.His469Arg) | | | ATAGTTGCCGATTTGGTACT′] |
| 4794 | NM_003159.2(CDKL5): c.62A > G | 6792 | CDKL5 | [′TTTGAGATCCTTGGGGTTGTAGGTGRAGGT |
| | (p.Glu21Gly) | | | AAGTTGGAATTTTTGCGTTCC′] |
| 4795 | NM_006306.3(SMC1A): c.3254A > | 8243 | SMC1A | [′GTGGCTACCAACATTGATGAGATCTRTAA |
| | G (p.Tyr1085Cys) | | | GGCCCTGTCCCGCAATAGCAGT′] |
| 4796 | NM_006306.3(SMC1A): c.616 − | 8243 | SMC1A | [′CCTGCCACCATTCCCCTGTTTGCACRGGCT |
| | 2A > G | | | GACCGGTACCAGCGCCTGAAG′] |
| 4797 | NM_003937.2(KYNU): c.592A > G | 8942 | KYNU | [′GCCTAACTTGATTTAGGGGGAAGAARCCT |
| | (p.Thr198Ala) | | | TAAGAATAGAGGATATCCTTGA′] |
| 4798 | NM_005343.2(HRAS): c.182A > G | −1 | — | [′TTGGACATCCTGGATACCGCCGGCCNGGA |
| | (p.Gln6lArg) | | | GGAGTACAGCGCCATGCGGGAC′] |
| 4799 | NM_012275.2(IL36RN): c.104A > G | 26525 | IL36RN | [′CTAGCTGGAGGGCTGCATGCAGGGARGGT |
| | (p.Lys35Arg) | | | CATTAAAGGTTGGTGATGAAAC′] |
| 4800 | NM_152296.4(ATP1A3): c.2318A > | 478 | ATP1A3 | [′TCCATTGCCTACACCCTGACCAGCADTATC |
| | G (p.Asn773Ser) | | | CCGGAGATCACGCCCTTCCTG′] |
| 4801 | NM_000891.2(KCNJ2): c.953A > G | 3759 | KCNJ2 | [′CAGTGCCGTAGCTCTTATCTAGCAARTGAA |
| | (p.Asn318Ser) | | | ATCCTGTGGGGCCACCGCTAT] |
| 4802 | NM_017909.3(RMND1): c.713A > G | 55005 | RMND1 | [′TACACTTACAGTTTTGTCTTTCACAYTCCA |
| | (p.Asn238Ser) | | | AAACACAGCAGCTCCTTCCCT] |
| 4803 | NM_005154.4(USP8): c.2150A > G | 9101 | USP8 | [′GAACCTTCCAAACTGAAGCGCTCCTDCTCC |
| | (p.Tyr717Cys) | | | TCCCCAGATATAACCCAGGCT′] |
| 4804 | NM_014191.3(SCN8A): c.667A > G | 6334 | SCN8A | [′CAATGTTTCAGCTCTACGCACTTTCRGGGT |
| | (p.Arg223Gly) | | | ACTGAGGGCTTTGAAAACTAT′] |
| 4805 | NM_021830.4(C10orf2): c.1754A > | 56652 | C10orf2 | [′CCCCAGGCAAGCCAGGAAGCAGACARTGT |
| | G (p.Asn585Ser) | | | TCTGATCCTGCAGGACAGGAAG′] |
| 4806 | NM_001164405.1(BHLHA9): c.211A > | 727857 | BHLHA9 | [′GTCCAAGGCGCGGCGCATGGCCGCCRACG |
| | G (p.Asn7lAsp) | | | TGCGGGAGCGCAAGCGCATCCT′] |
| 4807 | NM_002887.3(RARS): c.5A > G | 5917 | RARS | [′GAGTGAGACGCTGATGGGAGGATGGRCGT |
| | (p.Asp2 Gly) | | | ACTGGTGTCTGAGTGCTCCGCG′] |
| 4808 | NM_002887.3(RARS): c.1A > G | 5917 | RARS | [′TGGCGAGTGAGACGCTGATGGGAGGRTGG |
| | (p.Met1Val) | | | ACGTACTGGTGTCTGAGTGCTC′] |
| 4809 | NM_005861.3(STUB1): c.194A > G | 10273 | STUB1 | [′CCGCTGGTGGCCGTGTATTACACCARCCGG |
| | (p.Asn65Ser) | | | GCCTTGTGCTACCTGAAGATG′] |
| 4810 | NM_005211.3(CSF1R): c.2655 − | 1436 | CSF1R | [′ATGGGCATCCTCTGTCCTATCTCCCRGATA |
| | 2A > G | | | CAGCATCATGCAGGCCTGCTG′] |
| 4811 | NM_032228.5(FAR1): c.1094A > G | 84188 | FAR1 | [′CATAAGGCCCCAGCATTCCTGTATGRTATC |
| | (p.Asp365Gly) | | | TACCTCAGGATGACTGGAAGA′] |

| | | | | |
|---|---|---|---|---|
| 4812 | NM_020461.3(TUBGCP6): c.2546A > | 85378 | TUBGCP6 | [′GCCATCCCAGGCAGGCGAGTGTTGCYCTG |
| | G (p.Glu849Gly) | | | CAGACCCAGAATCACAGCCTTG′] |
| 4813 | NM_014305.3(TGDS): c.269A > G | 23483 | TGDS | [′TTTGTGAAACTGCTTTTTGAAACAGRGAAA |
| | (p.Glu90Gly) | | | ATAGATATAGTACTACATTTT′] |
| 4814 | NM_014305.3(TGDS): c.892A > G | 23483 | TGDS | [′TCTGTTTTGTTTTCCAAGACCCACCRATGA |
| | (p.Asn298Asp) | | | CATGAGATACCCAATGAAGTC′] |
| 4815 | NM_000118.3(ENG): c.1273 − 2A > G | 2022 | ENG | [′GCTCGACAGGATATTGACCACCGCCYGCG |
| | | | | GGGATAAAGCCAGGGAGCTGGT′] |
| 4816 | NM_005360.4(MAF): c.172A > G | 4094 | MAF | [′CATCGCCGGGGGCTCGCTGTCCTCCRCCCC |
| | (p.Thr58Ala) | | | CATGAGCACGCCGTGCAGCTC′] |
| 4817 | NM_002238.3(KCNH1): c.1399A > | 3756 | KCNH1 | [′ACCTCTAGCACTTCTCTATGCCACCRTCTT |
| | G (p.Ile467Val) | | | CGGGAATGTGACGACTATTTT′] |
| 4818 | NM_172362.2(KCNH1): c.1508A > | 3756 | KCNH1 | [′TTCGGGAATGTGACGACTATTTTCCRACAG |
| | G (p.Gln503Arg) | | | ATGTATGCCAACACCAACAGA′] |
| 4819 | NM_003392.4(WNT5A): c.257A > G | 7474 | WNT5A | [′GGACAGAAGAAACTGTGCCACTTGTRTCA |
| | (p.Tyr86Cys) | | | GGACCACATGCAGTACATCGGA′] |
| 4820 | NM_001199252.2(SGOL1): c.67A > | −1 | — | [GCCAAGTTTTTATTCCTTTTCTCTTYCATTC |
| | G (p.Lys23Glu) | | | GCTTCTTTATGTCTTCAAGA′] |
| 4821 | NM_000256.3(MYBPC3): c.2906 − | 4607 | MYBPC3 | [′ACTTAGCTACCCACTCTATACCCACRGAAC |
| | 2A > G | | | GGCCACGGCTTCAGCTGCCCA′] |
| 4822 | NM_000256.3(MYBPC3): c.1213A > | 4607 | MYBPC3 | [′GCTCAAGAATGGCCAGGAGATCCAGRTGA |
| | G (p.Met405Val) | | | GCGGCAGGTGCAGCCTGGGGTG′] |
| 4823 | NM_005188.3(CBL): c.1228 − 2A > G | 867 | CBL | [′TGTTACTATCTTTTGCTTCTTCTGCRGGAAT |
| | | | | CAGAAGGTCAGGGCTGTCCT′] |
| 4824 | NM_000257.3(MYH7): c.5326A > G | 4625 | MYH7 | [′TTCTTCATGCGCTCCAGGTGGGCGCYGGTG |
| | (p.Ser1776Gly) | | | TCCTGCTCCTTCTTCAGCTCC′] |
| 4825 | NM_000257.3(MYH7): c.2708A > G | 4625 | MYH7 | [′CAAGACAACCTGGCAGATGCTGAGGRGCG |
| | (p.Glu903Gly) | | | CTGTGATCAGCTGATCAAAAAC′] |
| 4826 | NM_000257.3(MYH7): c.1727A > G | 4625 | MYH7 | [′AATATCAAGGGGAAGCCTGAAGCCCRCTT |
| | (p.His576Arg) | | | CTCCCTGATCCACTATGCCGGC′] |
| 4827 | NM_000257.3(MYH7): c.1496A > G | 4625 | MYH7 | [′CACCACATGTTTGTGCTGGAGCAGGRGGA |
| | (p.Glu499Gly) | | | GTACAAGAAGGAGGGCATCGAG′] |
| 4828 | NM_000257.3(MYH7): c.2539A > G | 4625 | MYH7 | [′GCTGCTGAAGAGTGCAGAAAGAGAGRAGG |
| | (p.Lys847Glu) | | | AGATGGCCTCCATGAAGGAGGA′] |
| 4829 | NM_000257.3(MYH7): c.1954A > G | 4625 | MYH7 | [′CTTTCAGACTGTGTCAGCTCTGCACRGGGT |
| | (p.Arg652Gly) | | | GAGTGGGACACAGCCCCAGCC′] |
| 4830 | NM_000257.3(MYH7): c.1157A > G | 4625 | MYH7 | [′CTTCCAGAGGCTGACAAGTCTGCCTRCCTC |
| | (p.Tyr386Cys) | | | ATGGGGCTGAACTCAGCCGAC′] |
| 4831 | NM_000501.3(ELN): c.800 − 2A > G | 2006 | ELN | [′TACATTGCACTGTCCCCATCTCAACRGGTG |
| | | | | CTGGAGCAGCCGGAGTCCTCC′] |
| 4832 | NM_000117.2(EMD): c.266 − 2A > G | 2010 | EMD | [′TCTGCTACCGCTGCCCCCCTTCCCARGGCT |
| | | | | ACAATGACGACTACTATGAAG′] |
| 4833 | NM_000191.2(HMGCL): c.698A > G | 3155 | HMGCL | [′GTGCCTCTGGCTGCCCTGGCTGTCCRCTGC |
| | (p.His233Arg) | | | CATGACACCTATGGTCAAGCC′] |
| 4834 | NM_207352.3(CYP4V2): c.1393A > | 285440 | CYP4V2 | [′CTACGTGCCCTTCTCTGCTGGCCCCRGGAA |
| | G (p.Arg465Gly) | | | CTGTATAGGTTTGTATCCATC′] |
| 4835 | NM_013382.5(POMT2): c.1726 − | 29954 | POMT2 | [′GTCAGCAGGGTGGTCTCTATTCCACRGGGC |
| | 2A > G | | | CTACGCTTCTCAGGGGTCAAT′] |
| 4836 | NM_000169.2(GLA): c.802 − 2A > G | −1 | — | [′TTTGAATTATTTCATTCTTTTTCTCRGTTAG |
| | | | | TGATTGGCAACTTTGGCCTC′] |
| 4837 | NM_020166.4(MCCC1): c.137 − | 56922 | MCCC1 | [′GTGTGATTTTCATGGTGTTTTAAACRGGAA |
| | 2A > G | | | GAAACATTACCAAGGTCCTCA′] |
| 4838 | NM_006920.4(SCN1A): c.2557 − | 6323 | SCN1A | [′AATATATATTAATCTTTCATTTTCCRGCTG |
| | 2A > G | | | CGAGTTTTCAAGTTGGCAAAA′] |
| 4839 | NM_000501.3(ELN): c.890 − 2A > G | 2006 | ELN | [′CCTCACCCTCTGTGGCTGTGTTTTCRGGCG |
| | | | | TTGGGACTCCAGCTGCAGCTG′] |
| 4840 | NM_006306.3(SMC1A): c.2974 − | 8243 | SMC1A | [′TGACATTGCTGGGCCTGGGGCTTACRGGAT |
| | 2A > G | | | GCCCAGGCTGAGGAAGAGATC′] |
| 4841 | NM_001110792.1(MECP2): c.520A > | 4204 | MECP2 | [′TGATTTTGACTTCACGGTAACTGGGRGAGG |
| | G (p.Arg174Gly) | | | GAGCCCCTCCCGGCGAGAGCA′] |
| 4842 | NM_004646.3(NPHS1): c.1756A > G | 4868 | NPHS1 | [′CTTGTCCTGGGACAAGGAAGGGGAGRGGT |
| | (p.Arg586Gly) | | | GGGAGTGCGAGGGATCCCTCCC′] |
| 4843 | NM_003002.3(SDHD): c.275A > G | 6392 | SDHD | [′TATTTGAATCCTTGCTCTGCGATGGRCTAT |
| | (p.Asp92 Gly) | | | TCCCTGGCTGCAGCCCTCACT′] |
| 4844 | NM_004793.3(LONP1): c.2353A > G | 9361 | LONP1 | [′CACGCTGTTTGTGGAGACATCCCTGRGACG |
| | (p.Arg785Gly) | | | GCCACAGGACAAGGATGCCAA′] |
| 4845 | NC_012920.1: m.4279A > G | 4565 | MT-TI | [′TCAAACCTAAGAAATATGTCTGATARAAG |
| | | | | AGTTACTTTGATAGAGTAAATA′] |
| 4846 | NM_005633.3(SOS1): c.1430A > G | 6654 | SOS1 | [′ATTTGCTGTAAATCAAATCATGGGCRGCCA |
| | (p.Gln477Arg) | | | AGACTTCCTGGTGCTAGCAAT′] |
| 4847 | NM_000256.3(MYBPC3): c.1227 − | 4607 | MYBPC3 | [′TGCCACTTCCCTGCGGCCCCCACCCRGGTA |
| | 2A > G | | | CATCTTTGAGTCCATCGGTGC′] |
| 4848 | NM_002834.3(PTPN11): c.661A > G | 5781 | PTPN11 | [′CGATCAGCCCCTTAACACGACTCGTDTAA |
| | (p.Ile221Val) | | | ATGCTGCTGAAATAGAAAGCAG′] |
| 4849 | NM_000257.3(MYH7): c.4664A > G | −1 | — | [′TCCCAGGCCTCCCTGGAGCACGAGGRGGG |
| | (p.Glu1555Gly) | | | CAAGATCCTCCGGGCCCAGCTG′] |
| 4850 | NM_000257.3(MYH7): c.2792A > G | 4625 | MYH7 | [′AACGAGAGGCTGGAGGATGAGGAGGRGA |
| | (p.Glu931Gly) | | | TGAATGCTGAGCTCACTGCCAAG′] |
| 4851 | NM_000257.3(MYH7): c.2087A > G | 4625 | MYH7 | [′CTGGTCATGCACCAGCTGCGCTGCARTGGT |
| | (p.Asn696Ser) | | | GTGCTGGAGGGCATCCGCATC′] |
| 4852 | NM_000257.3(MYH7): c.1805A > G | 4625 | MYH7 | [′CTGCAGAAGAACAAGGATCCTCTCARTGA |
| | (p.Asn602Ser) | | | GACTGTCGTGGGCTTGTATCAG′] |
| 4853 | NM_000257.3(MYH7): c.1615A > G | 4625 | MYH7 | [′CATGTCCATCCTGGAAGAGGAGTGCRTGTT |
| | (p.Met539Val) | | | CCCCAAGGCCACCGACATGAC′] |
| 4854 | NM_000257.3(MYH7): c.1477A > G | 4625 | MYH7 | [′GCTGCAGCAGTTCTTCAACCACCACRTGTT |
| | (p.Met493Val) | | | TGTGCTGGAGCAGGAGGAGTA′] |
| 4855 | NM_000257.3(MYH7): c.1331A > G | 4625 | MYH7 | [′TTCAACTGGATGGTGACGCGCATCAVTGC |
| | (p.Asn444Ser) | | | CACCCTGGAGACCAAGCAGCCA′] |
| 4856 | NM_000257.3(MYH7): c.1315A > G | 4625 | MYH7 | [′AGGGTGGCATTGATGCGCGTCACCAHCCA |
| | (p.Met439Val) | | | GTTGAACATCCTCTCATACACT′] |
| 4857 | NM_000257.3(MYH7): c.1051A > G | 4625 | MYH7 | [′TTCAGAGGAGAAAAACTCCATGTATRAGC |
| | (p.Lys351Glu) | | | TGACAGGCGCCATCATGCACTT′] |
| 4858 | NM_000257.3(MYH7): c.789A > G | 4625 | MYH7 | [′CAGGAAAGTTGGCATCTGCAGACATRGAG |
| | (p.Ile263Met) | | | ACCTGTGAGTGCCATGAATCTG′] |
| 4859 | NM_000257.3(MYH7): c.617A > G | 4625 | MYH7 | [′ATTGCAGCCATTGGGGACCGCAGCARGAA |
| | (p.Lys206Arg) | | | GGACCAGAGCCCGGGCAAGGTA′] |
| 4860 | NM_000363.4(TNNI3): c.616A > G | 7137 | TNNI3 | [′ACTGAGTGGAATGGAGGGCCGCAAGVAAA |
| | (p.Lys206Glu) | | | AGTTTGAGAGCTGAGCCTTCCT] |
| 4861 | NM_000363.4(TNNI3): c.547A > G | 7137 | TNNI3 | [′GCAGGTGAAGAAGGAGGACACCGAGRAG |
| | (p.Lys183Glu) | | | GTGAGTGTGGGCTAAGGCCAGGA′] |
| 4862 | NM_000169.2(GLA): c.370 − 2A > G | −1 | — | [′TGACTCTTTTCCTCCCTCTCATTTCRGGTTC |
| | | | | ACAGCAAAGGACTGAAGCTA′] |
| 4863 | NM_000051.3(ATM): c.1A > G | 472 | ATM | [′GATGTGTGTTCTGAAATTGTGAACCVTGAG |
| | (p.Met1Val) | | | TCTAGTACTTAATGATCTGCT′] |
| 4864 | NM_000051.3(ATM): c.3154 − 2A > G | 472 | ATM | [′TATTTAACCACAGTTCTTTTCCCGTRGGCT |
| | | | | GATCCTTATTCAAAATGGGCC′] |
| 4865 | NM_024675.3(PALB2): c.212 − | 79728 | PALB2 | [′AGTTATATACATTTTTTTCCTCCTCRGAAC |
| | 2A > G | | | CTAAAAATAAAATATGTGTTT′] |
| 4866 | NM_024675.3(PALB2): c.109 − | 79728 | PALB2 | [′TTCTGGGGCTGTTTTTGTCTCCTCTRGCGTG |
| | 2A > G | | | CCCAAAGAGCTGAAAAGATT′] |
| 4867 | NM_000546.5(TP53): c.709A > G | 7157 | TP53 | [′CTGTACCACCATCCACTACAACTACRTGTG |
| | (p.Met237Val) | | | TAACAGTTCCTGCATGGGCGG′] |
| 4868 | NM_000455.4(STK11): c.889A > G | 6794 | STK11 | [′GATGCTTGAGTACGAACCGGCCAAGRGGT |
| | (p.Arg297Gly) | | | TCTCCATCCGGCAGATCCGGCA′] |
| 4869 | NM_017777.3(MKS1): c.1382A > G | 54903 | MKS1 | [′TCTCTGGAACTGGAGGACCTCTCCTRTGTA |
| | (p.Tyr461Cys) | | | CGGATACCAGGATCCTTCAAG′] |
| 4870 | NM_001231.4(CASQ1): c.731A > G | 844 | CASQ1 | [′ATGGAAGAGCCTGTGACCATCCCAGRCAA |
| | (p.Asp244Gly) | | | GCCCAATAGCGAAGAGGAGATT′] |
| 4871 | NM_001242896.1(DEPDC5): c.2355 − | 9681 | DEPDC5 | [′GTATGAGCAATCATCTGTTGTTTTCRGGAG |
| | 2A > G (p.Arg785_Gly839del) | | | GGACGAAGATGGTGTGCAGAT′] |
| 4872 | NM_001039550.1(DNAJB2): c.14A > | 3300 | DNAJB2 | [′TGACCAGTTGCCATGGCATCCTACTRCGAG |
| | G (p.Tyr5Cys) | | | ATCCTAGACGTGCCGCGAAGT′] |
| 4873 | NM_007294.3(BRCA1): c.5057A > | 672 | BRCA1 | [′AATCTAATTACTGAAGAGACTACTCRTGTT |
| | G (p.His1686Arg) | | | GTTATGAAAACAGGTATACCA′] |
| 4874 | NM_006888.4(CALM1): c.389A > G | 801 | CALM1 | [′GTAGATGAAATGATCAGAGAAGCAGRTAT |
| | (p.Asp130Gly) | | | TGATGGAGACGGACAAGTCAAC′] |
| 4875 | NM_001082538.2(TCTN1): c.342 − | 79600 | TCTN1 | [′TTGTATTATTATTTTTTTAATTTTCRGGGGC |
| | 2A > G | | | GACAGCCAGTTTTGTAGTCA′] |
| 4876 | NM_003000.2(SDHB): c.541 − 2A > G | 6390 | SDHB | [′TCCTGCCTCTCTTTTCTCCCCATACRGGAC |
| | | | | GGGCTCTACGAGTGCATTCTC′] |
| 4877 | NM_000143.3(FH): c.700A > G | 2271 | FH | [′AGTGGAACAGCATCCTGAGTATGAGYACG |
| | (p.Thr234Ala) | | | TCCAATCTTGATGATCTGTGCA′] |
| 4878 | NM_000038.5(APC): c.221 − 2A > G | 324 | APC | [′ATAAAAACTTGTTTCTATTTTATTTRGAGC |
| | | | | TTAACTTAGATAGCAGTAATT′] |
| 4879 | NM_000314.6(PTEN): c.527A > G | 5728 | PTEN | [′ATTCCCAGTCAGAGGCGCTATGTGTRTTAT |
| | (p.Tyr176Cys) | | | TATAGCTACCTGTTAAAGAAT′] |
| 4880 | NM_030813.5(CLPB): c.1850A > G | 81570 | CLPB | [′CTGGTCGACGGCTACAATGTGCACTRTGGC |
| | (p.Tyr617Cys) | | | GCCCGCTCCATCAAACATGAG′] |
| 4881 | NM_030813.5(CLPB): c.1222A > G | 81570 | CLPB | [′TCCTGGAACTCGGACATGTCCAGCCHGAT |
| | (p.Arg408Gly) | | | GAAGCCCTGTGTGGAAACAAGC′] |
| 4882 | NM_016069.9(PAM16): c.226A > G | −1 | — | [′CTCACCCGTCCCCTCTCCTCTGCAGRACTA |
| | (p.Asn76Asp) | | | TGAACACTTATTTAAGGTGAA′] |
| 4883 | NM_058163.1(TSR2): c.191A > G | 90121 | TSR2 | [′TACTTAGCTGACTTGGAGCTAGATGRGGTG |
| | (p.Glu64Gly) | | | GAAGACTTCCTTGGAGAGCTG′] |
| 4884 | NM_001031.4(RPS28): c.1A > G | 6234 | RPS28 | [′ATAGGCTGCACACGGCTGGTGTCCAYGAT |
| | (p.Met1Val) | | | GGCGGCGCGGCGGCGGTCTGGC′] |
| 4885 | NM_005957.4(MTHFR): c.1114A > | 4524 | MTHFR | [′TCCCATCTTCTGGGCCTCCAGACCARAGAG |
| | G (p.Lys372Glu) | | | TTACATCTACCGTACCCAGGA′] |
| 4886 | NM_014946.3(SPAST): c.1165A > G | 6683 | SPAST | [′CTTTGGTCCACCTGGGAATGGGAAGRCAA |
| | (p.Thr389Ala) | | | TGCTGGTAAGGGTTCTCTTCAA′] |
| 4887 | NM_000228.2(LAMB3): c.565 − | 3914 | LAMB3 | [′TAAATCCATAAGGTTAAGTTGGACCYACA |
| | 2A > G | | | GAGGGAAGGGAAAGAGAAGCGC′] |
| 4888 | NM_000492.3(CFTR): c.3368 − | 1080 | CFTR | [′TCATTTACGTCTTTTGTGCATCTATDGGAG |
| | 2A > G | | | AAGGAGAAGGAAGAGTTGGTA′] |
| 4889 | NM_006785.3(MALT1): c.1019 − | 10892 | MALT1 | [′AACACCCCCTTTCTTTTTTTTTCAARGCGA |
| | 2A > G | | | AGGACAAGGTTGCCCTTTTGA′] |
| 4890 | NM_004771.3(MMP20): c.611A > G | 9313 | MMP20 | [′GGAGAAGGCCTGGGAGGAGATACACRTTT |
| | (p.His204Arg) | | | CGACAATGCTGAGAAGTGGACT′] |
| 4891 | NM_000918.3(P4HB): c.1178A > G | 5034 | P4HB | [′CACCCTAGAACTGCTTTCTTTTCAGRTGCC |
| | (p.Tyr393Cys) | | | CCATGGTGTGGTCACTGCAAA′] |
| 4892 | NM_177405.2(CECR1): c.355A > G | 51816 | CECR1 | [′TGCTCGCATCCCGCAGGCTCACCTGYTTCT |
| | (p.Thr119Ala) | | | CCGGCGTGGAAGAAGTAAGGC′] |
| 4893 | NM_004990.3(MARS): c.1031A > G | 4141 | MARS | [′TACCACATCATCCATGCTGACATCTRCCGC |
| | (p.Tyr344Cys) | | | TGGTTTAACATTTCGTTTGAT′] |
| 4894 | NM_025132.3(WDR19): c.407 − | 57728 | WDR19 | [′TCTGTATAAAAATAATCTCTTTTTCRGGAA |
| | 2A > G | | | AACATACTAAGAGAATCACTT′] |
| 4895 | NM_000314.6(PTEN): c.139A > G | 5728 | PTEN | [′TGCAGAAAGACTTGAAGGCGTATACRGGA |
| | (p.Arg47Gly) | | | ACAATATTGATGATGTAGTAAG′] |
| 4896 | NM_000314.6(PTEN): c.182A > G | 5728 | PTEN | [′GTTTTAAGGTTTTTGGATTCAAAGCDTAAA |
| | (p.His61Arg) | | | AACCATTACAAGATATACAAT′] |
| 4897 | NM_000314.6(PTEN): c.254 − 2A > G | 5728 | PTEN | [′TATTCTGAGGTTATCTTTTTACCACRGTTG |
| | | | | CACAATATCCTTTTGAAGACC′] |
| 4898 | NM_000314.6(PTEN): c.320A > G | 5728 | PTEN | [′GAACTTATCAAACCCTTTTGTGAAGRTCTT |
| | (p.Asp107Gly) | | | GACCAATGGCTAAGTGAAGAT′] |
| 4899 | NM_000314.6(PTEN): c.512A > G | 5728 | PTEN | [′CACCAGGGAGTAACTATTCCCAGTCRGAG |
| | (p.Gln171Arg) | | | GCGCTATGTGTATTATTATAGC′] |
| 4900 | NM_000314.6(PTEN): c.802 − 2A > G | 5728 | PTEN | [′TTTTCTTTTCTTTTTTTTTTTTTTTDGGACAA |
| | | | | AATGTTTCACTTTTGGGTA′] |
| 4901 | NM_001103.3(ACTN2): c.1883A > | 88 | ACTN2 | [′ATCCGCGATCAATCCCTGCAGGAGGRGCT |
| | G (p.Glu628Gly) | | | GGCTCGCCAGCATGCTAACGAG′] |
| 4902 | NM_003159.2(CDKL5): c.462 − | 6792 | CDKL5 | [′GCTTTTAATTGTGTTTGTTTTTTTCRGGGAG |
| | 2A > G | | | TCATTTAATACTTCATGATT′] |
| 4903 | NM_003159.2(CDKL5): c.91A > G | 6792 | CDKL5 | [′AGCCTATGGAGTTGTACTTAAATGCRGAC |
| | (p.Arg31Gly) | | | ACAAGGCAAGTACATTATTTTT′] |
| 4904 | NM_003159.2(CDKL5): c.458A > G | 6792 | CDKL5 | [′CACAATGATGTCCTAAAACTGTGTGRCTTT |
| | (p.Asp153Gly) | | | GGTAAGTTAAAAAGAAATTAA′] |
| 4905 | NM_003159.2(CDKL5): c.2277 − | 6792 | CDKL5 | [′ATATGATAAAAATGTCTTCTCATTTRGGAA |
| | 2A > G | | | AAGTCCTGAAAATATTAGTCA′] |
| 4906 | NM_021098.2(CACNA1H): c.4645A > | 8912 | CACNA1H | [′CATCGTCAGCTTCTTCGTGCTCAACRTGTT |
| | G (p.Met1549Val) | | | CGTGGGCGTCGTGGTCGAGAA′] |
| 4907 | NM_003816.2(ADAM9): c.1396 − | 8754 | ADAM9 | [′TGTTTAATTTGAATTCTATTTCACTRGTTCC |
| | 2A > G | | | TTCCAGGAGGTACTTTATGC′] |
| 4908 | NM_212472.2(PRKAR1A): c.177 + 3A > | 5573 | PRKAR1A | [′AATACTTTGAGAGGTTGGAGAAGGTRAAA |
| | G | | | ATAAATGTGGGGAGATGATGAG′] |
| 4909 | NM_001204830.1(LIPT1): c.535A > | −1 | — | [′CCGGACTACTGCCTATCACCATTGCRCTTT |
| | G (p.Thr179Ala) | | | ATTATGTAGTACTGATGGGAC′] |
| 4910 | NM_001165963.1(SCN1A): c.5264A > | −1 | — | [′AACCCTGGAAGCTCAGTTAAGGGAGRCTG |
| | G (p.Asp1755Gly) | | | TGGGAACCCATCTGTTGGAATT′] |
| 4911 | NM_001165963.1(SCN1A): c.3880 − | −1 | — | [′TAATTGTTATTATTTTTGTGTGTGCRGGTTT |
| | 2A > G | | | CATTGGTCAGTTTAACAGCA′] |
| 4912 | NM_001165963.1(SCN1A): c.2537A > | 6323 | SCN1A | [′TTTATTGTGACGCTTAGCCTGGTAGRACTT |
| | G (p.Glu846Gly) | | | GGACTCGCCAATGTGGAAGGA′] |
| 4913 | NM_001165963.1(SCN1A): c.2353A > | 6323 | SCN1A | [′GTCATTGGATAGTGCTCCATGGCCAHGAA |
| | G (p.Met785Val) | | | AAGAGTATTTAAGACAATACAG′] |
| 4914 | NM_001165963.1(SCN1A): c.1662 + | 6323 | SCN1A | [′AGAGGTACTCCTCCCCACACCAGGTRTGG |
| | 3A > G | | | CACTGCTGAGTTTACTGATGCA′] |
| 4915 | NM_001165963.1(SCN1A): c.1076A > | 6323 | SCN1A | [′TGTGTGAAAGCTGGTAGAAATCCCADTTA |
| | G (p.Asn359Ser) | | | TGGCTACACAAGCTTTGATACC] |
| 4916 | NM_001165963.1(SCN1A): c.1048A > | 6323 | SCN1A | [′TTGCAGCCAATGTCCAGAGGGATATRTGT |
| | G (p.Met350Val) | | | GTGTGAAAGCTGGTAGAAATCC′] |
| 4917 | NM_001165963.1(SCN1A): c.1046A > | 6323 | SCN1A | [′ACTTGCAGCCAATGTCCAGAGGGATRTAT |
| | G (p.Tyr349Cys) | | | GTGTGTGAAAGCTGGTAGAAAT′] |
| 4918 | NM_001165963.1(SCN1A): c.433A > | 6323 | SCN1A | [′CACTATTTTGACAAACTGTGTGTTTRTGAC |
| | G (p.Met145Val) | | | AATGAGTAACCCTCCTGATTG′] |
| 4919 | NM_001165963.1(SCN1A): c.383 + | 6323 | SCN1A | [′TAGCTATTAAGATTTTGGTACATTCRTATC |
| | 1A > G | | | CTTTTTCAAGTGATTAATATT′] |
| 4920 | NM_001605.2(AARS): c.2251A > G | 16 | AARS | [′TCGGCACCTGTGACAGCCACAATCCYCCG |
| | (p.Arg751Gly) | | | GATACCCTTGGCAATGGCTTCT′] |
| 4921 | NM_000124.3(ERCC6): c.2830 − | 2074 | ERCC6 | [′TATTCTCCATGCTCGCTCCCGGGCCYGCAA |
| | 2A > G | | | CAGAGAGAGAGAGACCTCTCA′] |
| 4922 | NM_000124.3(ERCC6): c.2599 − | 2074 | ERCC6 | [′ACTGGGAATGTGTATTTGCTTTGCAVACTC |
| | 26A > G | | | CTATCCCCCACCTCCAAACAG′] |
| 4923 | NM_001110556.1(FLNA): c.1829 − | 2316 | FLNA | [′ACTGAGGGGACTGGTGGCTGTTGTCRGGC |
| | 2A > G | | | TTCTCGGTGGAAGGGCCATCGC′] |
| 4924 | NM_006129.4(BMP1): c.808A > G | 649 | BMP1 | [′GGAGACCTATGACTTCGACAGCATCRTGC |
| | (p.Met270Val) | | | ATTACGCTCGGAACACATTCTC′] |
| 4925 | NM_001987.4(ETV6): c.1252A > G | 2120 | ETV6 | [′GGAGCCAGGACAAAGGCTTTTGTTCRGGT |
| | (p.Arg418Gly) | | | AGCACTTCCTTTTTCTCCTTTC′] |
| 4926 | NM_014423.3(AFF4): c.760A > G | 27125 | AFF4 | [′GTCCAATTCAATGTTACAGAAACCCRCTGC |
| | (p.Thr254Ala) | | | CTATGTGCGGCCCATGGACGG′] |
| 4927 | NM_002055.4(GFAP): c.1085A > G | 2670 | GFAP | [′AATGTCAAGCTGGCCCTGGACATCGRGAT |
| | (p.Glu362Gly) | | | CGCCACCTACAGGAAGCTGCTA′] |
| 4928 | NM_002055.4(GFAP): c.256A > G | 2670 | GFAP | [′TGACCGCTTTGCCAGCTACATCGAGRAGGT |
| | (p.Lys86Glu) | | | TCGCTTCCTGGAACAGCAAAA′] |
| 4929 | NM_006017.2(PROM1): c.2077 − | 8842 | PROM1 | [′ATTTGCTGTTCTTCACAGCTTTAGGRTATG |
| | 521A > G | | | TATCCAATGTTTTCTTCAGGT′] |
| 4930 | NM_002755.3(MAP2K1): c.305A > | 5604 | MAP2K1 | [′ACCTTTCTCCAGCTAATTCATCTGGRGATC |
| | G (p.Glu102Gly) | | | AAACCCGCAATCCGGAACCAG′] |
| 4931 | NM_001288953.1(TTC7A): c.1715A > | 57217 | TTC7A | [′CGTCCCCACAGCCTGATGTTCACCARGGTG |
| | G (p.Lys572Arg) | | | AAGCTGGAGCAGGTGCTGAAA′] |
| 4932 | NM_016218.2(POLK): c.181A > G | 51426 | POLK | [′TGAGCTCAAGAAAGAAAAGCAAGTCRACC |
| | (p.Asn6lAsp) | | | AACGAATTGAAAATATGATGCA′] |
| 4933 | NM_016218.2(POLK): c.1385A > G | 51426 | POLK | [′AGAACTGTTACCATTAAGTTGAAGARTGT |
| | (p.Asn462Ser) | | | GAATTTTGAAGTAAAAACTCGT′] |
| 4934 | NM_016218.2(POLK): c.1477A > G | 51426 | POLK | [′ATTTGCCATTGCTAAGGAATTGCTARAAAC |
| | (p.Lys493Glu) | | | AGAAATTGATGCTGATTTTCC′] |
| 4935 | NM_001040431.2(COA3): c.215A > | 28958 | COA3 | [′GGAAATCGAGTAGAAGGTGTAACCAYCTG |
| | G (p.Tyr72Cys) | | | GGGAGGTAGGTTCAGGAAACCA′] |
| 4936 | NM_000891.2(KCNJ2): c.901A > G | 3759 | KCNJ2 | [′TGAAATCGTGGTCATACTGGAAGGCRTGG |
| | (p.Met301Val) | | | TGGAAGCCACTGCCATGACGAC′] |
| 4937 | NM_144499.2(GNAT1): c.386A > G | 2779 | GNAT1 | [′GACATCATCCAGCGGCTGTGGAAGGRCTC |
| | (p.Asp129Gly) | | | CGGTATCCAGGCCTGTTTTGAG′] |
| 4938 | NM_018965.3(TREM2): c.113A > G | 54209 | TREM2 | [′CAGTCCCTGCAGGTGTCTTGCCCCTRTGAC |
| | (p.Tyr38Cys) | | | TCCATGAAGCACTGGGGGAGG′] |
| 4939 | NM_194277.2(FRMD7): c.556A > G | 90167 | FRMD7 | [′ACTGGACATAGCAAGGAAGCTGGATRTGT |
| | (p.Met186Val) | | | ATGGCATCAGGCCTCACCCCGC′] |
| 4940 | NM_001003811.1(TEX11): c.511A > | 56159 | TEX11 | [′TCACTCTCAACAGTAATCTTCTCCAYGGTC |
| | G (p.Met171Val) | | | AAGTCAGCCTCAGGGGAGCTC′] |
| 4941 | NM_000921.4(PDE3A): c.1333A > G | 5139 | PDE3A | [′AGTTTCTTCCACTTGGACCACCACCRCCTC |
| | (p.Thr445Ala) | | | GGCCACAGGTCTACCCACCTT′] |
| 4942 | NM_000033.3(ABCD1): c.887A > G | 215 | ABCD1 | [′GCCAACTCGGAGGAGATCGCCTTCTRTGG |
| | (p.Tyr296Cys) | | | GGGCCATGAGGTGGGGCAGGTT′] |
| 4943 | NM_000169.2(GLA): c.137A > G | −1 | — | [′AGGACGCCTACCATGGGCTGGCTGCDCTG |
| | (p.His46Arg) | | | GGAGCGCTTCATGTGCAACCTT′] |
| 4944 | NM_000033.3(ABCD1): c.1992 − | 215 | ABCD1 | [′CCCTGACCCTGTCCCTCTCCTGGCCRGGAA |
| | 2A > G | | | ATACCACACACACTTGCTACA′] |
| 4945 | NM_000182.4(HADHA): c.919 − | 3030 | HADHA | [′TTGCTCAATTCCAGTCTTTACCACCYAAAA |
| | 2A > G | | | AACATATAAAGCACTTGCTCA′] |
| 4946 | NM_000159.3(GCDH): c.1213A > G | 2639 | GCDH | [′CGAGTATCACGTGATCCGGCACGCCRTGA |
| | (p.Met405Val) | | | ACCTGGAGGCCGTGAACACCTA′] |
| 4947 | NM_004006.2(DMD): c.1150 − 2A > G | 1756 | DMD | [′ACAATTGTTAACTTCCTTCTTTGTCRGGGG |
| | | | | TACATGATGGATTTGACAGCC′] |
| 4948 | NM_019109.4(ALG1): c.1188 − | 56052 | ALG1 | [′CTCAGGCTCCCTTGGTTCTCTCTGCRGTTT |
| | 2A > G | | | ACATGAGCTGGTGAAACATGA′] |
| 4949 | NM_004463.2(FGD1): c.2016 − | 2245 | FGD1 | [′TCTTTCTTTTTTATTCCCCACCCCARGGACT |
| | 2A > G | | | GAGGAGGAGAAGAAAGACTG′] |
| 4950 | NM_198525.2(KIF7): c.2981A > G | 374654 | KIF7 | [′CTGCTGCTGGCTCTGGGCGCTGCCCYGCCG |
| | (p.Gln994Arg) | | | CAGCTGCCCGCTCTTCTCGGA′] |
| 4951 | NM_020366.3(RPGRIP1): c.3749 − | 57096 | RPGRIP1 | [′ATGCTGTTTTTTTCCCTTTCCCAACRGTTGT |
| | 2A > G | | | TAGCCCTGAAGATCTGGCTA′] |
| 4952 | NM_003494.3(DYSF): c.3041A > G | 8291 | DYSF | [′GTTCCCCCTCCCCCAGGCTGGGAGTRTAGC |
| | (p.Tyr1014Cys) | | | ATCACCATCCCCCCGGAGCGG′] |
| 4953 | NM_003494.3(DYSF): c.3349 − | 8291 | DYSF | [′CTGCCATAACCAGCTTCGTGTCTCCRGGGC |
| | 2A > G | | | GGCGTGATGGATGACAAGAGT′] |
| 4954 | NM_004006.2(DMD): c.4675 − 2A > G | 1756 | DMD | [′ATTACATTTCATTATAATTCTTTTCRGGTA |
| | | | | ACAGAAAGAAAGCAACAGTTG′] |
| 4955 | NM_000169.2(GLA): c.620A > G | −1 | — | [′GTGTACTCCTGTGAGTGGCCTCTTTRTATG |
| | (p.Tyr207Cys) | | | TGGCCCTTTCAAAAGGTGAGA′] |
| 4956 | NM_022124.5(CDH23): c.146 − | −1 | — | [′CTCTGCTCTCTCCCTTGGCTACTCCRGGTTC |
| | 2A > G | | | TTCTGTGACCCAGTTGCTGG′] |
| 4957 | NM_000169.2(GLA): c.801 + 3A > G | −1 | — | [′GGGGTTGGAATGACCCAGATATGGTRAAA |
| | | | | ACTTGAGCCCTCCTTGTTCAAG′] |
| 4958 | NM_000019.3(ACAT1): c.473A > G | 38 | ACAT1 | [′GCAGGTGGGATGGAGAGCATGTCCARTGT |
| | (p.Asn158Ser) | | | TCCATATGTAATGAACAGAGGA′] |
| 4959 | NM_000553.4(WRN): c.561A > G | 7486 | WRN | [′GTCTGGTTAAACACCTCTTAGGTAARCAGC |
| | (p.Lys187=) | | | TCCTGAAAGACAAGTCTATCC′] |
| 4960 | NM_000050.4(ASS1): c.421 − 2A > G | 445 | ASS1 | [′GGCTCTGACCCCTTGTCCTATGTCCDGGTC |
| | | | | ATTGCTCCCTGGAGGATGCCT′] |
| 4961 | NM_020166.4(MCCC1): c.640 − | 56922 | MCCC1 | [′TTCTGATCTAACAATCCTCATTCCCYAAGA |
| | 2A > G | | | GAGAAAAGATGATTATGACTA′] |
| 4962 | NM_004006.2(DMD): c.10554 − | 1756 | DMD | [′TCTTTTTTACTTTTTTGATGCCAATRGGAAT |
| | 2A > G | | | CTGCAAGCAGAATATGACCG′] |
| 4963 | NM_017653.3(DYM): c.621 − 2A > G | 54808 | DYM | [′ACAAGTTTGCTGGTGTATGGAAGACYATA |
| | | | | CAAAAAGGAAAAAAAAATCAAA′] |
| 4964 | NM_001098398.1(COPA): c.728A > | −1 | — | [′TCAGAATCAAAGGCATGGGAGGTTGRTAC |
| | G (p.Asp243Gly) | | | CTGCCGGGGCCATTACAACAAT′] |
| 4965 | NM_005045.3(RELN): c.2288A > G | 5649 | RELN | [′CGTCAGCTAATTACATCTTTCCTTGRCAGC |
| | (p.Asp763Gly) | | | TCACAATCCAGGTGAGTGAAG′] |
| 4966 | NM_207111.3(RNF216): c.1616A > | 54476 | RNF216 | [′TGCCATCTCTTTGATTTTCTGCTCAHAGAA |
| | G (p.Tyr539Cys) | | | CTCCTGCTCTTGTTGCACAGC′] |
| 4967 | NM_001035.2(RYR2): c.568A > G | 6262 | RYR2 | [′CATCTTAGTTAGCGTGTCCTCTGAARGGTA |
| | (p.Arg190Gly) | | | CTTGGTAAGTGTGGAAAGTAG′] |
| 4968 | NM_001035.2(RYR2): c.11965A > G | 6262 | RYR2 | [′AAATGCAACTGCTTTACCACCAGGTVATGT |
| | (p.Asn3989Asp) | | | TGTTAATGGAACGATTGGCAA′] |
| 4969 | NM_001035.2(RYR2): c.12290A > G | 6262 | RYR2 | [′GAACCTGCGAAGGACATCGGCTTCARCGT |
| | (p.Asn4097Ser) | | | CGCCGTCCTTCTGACAAACCTC′] |
| 4970 | NM_001035.2(RYR2): c.12533A > G | 6262 | RYR2 | [′AGACAGTTCATATTTGACGTGGTCARCGA |
| | (p.Asn4178Ser) | | | AGGCGGAGAGAAAGAGAAGATG′] |
| 4971 | NM_000090.3(COL3A1): c.2338 − | 1281 | COL3A1 | [′ACAGTGACATGGCTTCTCTTTTTCCRGGGT |
| | 2A > G | | | GAAGGTGGTGCCCCCGGACTT′] |
| 4972 | NM_198056.2(SCN5A): c.4462A > G | 6331 | SCN5A | [′CTTAGGGGGCCAGGACATCTTCATGRCAG |
| | (p.Thr1488Ala) | | | AGGAGCAGAAGAAGTACTACAA′] |
| 4973 | NM_198056.2(SCN5A): c.4453A > G | 6331 | SCN5A | [′CTCTTTGCACTTAGGGGGCCAGGACRTCTT |
| | (p.Ile1485Val) | | | CATGACAGAGGAGCAGAAGAA′] |
| 4974 | NM_198056.2(SCN5A): c.2788 − | 6331 | SCN5A | [′GGTGAGCCTGACCCATTATCTCGACRGGTC |
| | 2A > G | | | CTGAATCTCTTCCTGGCCTTG′] |
| 4975 | NM_198056.2(SCN5A): c.1247A > G | 6331 | SCN5A | [′GATGGTGGCTTGGTTTTGCTCCTCAYAGGC |
| | (p.Tyr416Cys) | | | CATTGCGACCACGGCCAGGAT′] |
| 4976 | NM_004415.2(DSP): c.1141 − 2A > G | 1832 | DSP | [′TTCACTGATCACTCTCATCCTTCACRGTTTT |
| | | | | TTGAAGAGGCGCAGTCTACT′] |
| 4977 | NM_000238.3(KCNH2): c.2582A > | 3757 | KCNH2 | [′TGGTCCAGCCTGGAGATCACCTTCANCCTG |
| | G (p.Asn861Ser) | | | CGAGATGTGAGTTGGCTGCCC′] |
| 4978 | NM_000238.3(KCNH2): c.1913A > | 3757 | KCNH2 | [′GTCTCTCCCAACACCAACTCAGAGARGAT |
| | G (p.Lys638Arg) | | | CTTCTCCATCTGCGTCATGCTC′] |
| 4979 | NM_000238.3(KCNH2): c.1904A > | 3757 | KCNH2 | [′TTCGGCAACGTCTCTCCCAACACCADCTCA |
| | G (p.Asn635Ser) | | | GAGAAGATCTTCTCCATCTGC′] |
| 4980 | NM_000238.3(KCNH2): c.1900A > | 3757 | KCNH2 | [′GGGCTTCGGCAACGTCTCTCCCAACRCCAA |
| | G (p.Thr634Ala) | | | CTCAGAGAAGATCTTCTCCAT′] |
| 4981 | NM_000238.3(KCNH2): c.1129 − | 3757 | KCNH2 | [′CCACACCTCCGCCTTCCCCGGGTGCRGGTC |
| | 2A > G | | | CTGTCCCTGGGCGCCGACGTG′] |
| 4982 | NM_000238.3(KCNH2): c.296A > G | 3757 | KCNH2 | [′GAGCGCAAAGTGGAAATCGCCTTCTVCCG |
| | (p.Tyr99Cys) | | | GAAAGATGGTAGGAGCGGGCCG′] |
| 4983 | NM_000238.3(KCNH2): c.133A > G | 3757 | KCNH2 | [′GGAGAACTGCGCCGTCATCTACTGCDACG |
| | (p.Asn45Asp) | | | ACGGCTTCTGCGAGCTGTGCGG′] |
| 4984 | NM_001613.2(ACTA2): c.1A > G | 59 | ACTA2 | [′AGAATCCTGTGAAGCAGCTCCAGCTRTGT |
| | (p.Met1Val) | | | GTGAAGAAGAGGACAGCACTGC′] |
| 4985 | NM_000218.2(KCNQ1): c.605A > G | 3784 | KCNQ1 | [′GCTCCCCCTCTCCTGCACTCCACAGRCCTC |
| | (p.Asp202Gly) | | | ATCGTGGTCGTGGCCTCCATG′] |
| 4986 | NM_000218.2(KCNQ1): c.1033 − | 3784 | KCNQ1 | [′GGGAGCCTCCTGTCCATTCCTTCCCVGGGG |
| | 2A > G | | | ATTCTTGGCTCGGGGTTTGCC′] |
| 4987 | NM_000218.2(KCNQ1): c.1515 − | 3784 | KCNQ1 | [′CAATCTCCTCTCCTCTCTCCACTGCRGGCT |
| | 2A > G | | | GCGGGAACACCATCGGGCCAC′] |
| 4988 | NM_000218.2(KCNQ1): c.1787A > | 3784 | KCNQ1 | [′ATCGGCGCCCGCCTGAACCGAGTAGRAGA |
| | G (p.Glu596Gly) | | | CAAGGTAGGCTCACGCGCCGGC′] |
| 4989 | NM_000138.4(FBN1): c.7916A > G | 2200 | FBN1 | [′TGCATGTGTCCCGCCGGCTTCCAGTRTGAA |
| | (p.Tyr2639Cys) | | | CAGTTCAGTGGAGGATGCCAA′] |
| 4990 | NM_000138.4(FBN1): c.4337 − | 2200 | FBN1 | [′TTTTGCTTTTTTCTCCCTCCCCCCARGATAT |
| | 2A > G | | | TGATGAGTGCTCCCTTCCGA′] |
| 4991 | NM_000138.4(FBN1): c.3344A > G | 2200 | FBN1 | [′GGTCATTTCCATTTTGCAGATATTGRTGAG |
| | (p.Asp1115Gly) | | | TGTCAGAGAGATCCTCTCCTA′] |
| 4992 | NM_001943.3(DSG2): c.880A > G | 1829 | DSG2 | [′AGTCAACGTAGAAGTTACGCGCATARAAG |
| | (p.Lys294Glu) | | | TGTTCGATGCAGATGAAATAGG′] |
| 4993 | NM_001927.3(DES): c.1324A > G | 1674 | DES | [′TGAGCAAAGGGGTTCTGAGGTCCATRCCA |
| | (p.Thr442Ala) | | | AGAAGACGGTGATGATCAAGAC′] |
| 4994 | NM_004572.3(PKP2): c.1171 − 2A > G | 5318 | PKP2 | [′AGAAATATGCATCTGCTTCTTCCCCRGGTT |
| | | | | AACCAGCTTCGTGGCATCCTC′] |
| 4995 | NM_001256850.1(TTN): c.45629 − | −1 | — | [′GATATGAATATTTCACTCTTTTCTCRGGTC |
| | 2A > G | | | CTCCCTCACCACCCCTTGACC′] |
| 4996 | NM_013254.3(TBK1): c.1201A > G | 29110 | TBK1 | [′ACTTCATATTTCAGTTTCCCTCCCTRAAGT |
| | (p.Lys401Glu) | | | ACATCCACGTTATGATTTAGA′] |
| 4997 | NM_030973.3(MED25): c.116A > G | 81857 | MED25 | [′TACTTCGAGGGGCTCCGCAAGCACTRCCTG |
| | (p.Tyr39Cys) | | | CTCCCGGCCATCGAGTGAGTG′] |
| 4998 | NM_145207.2(SPATA5): c.1883A > | 166378 | SPATA5 | [′TCTATTTTTCAGGTATCCTGGTCAGRTATA |
| | G (p.Asp628Gly) | | | GGAGGACTGGAAAGTATCAAA′] |
| 4999 | NM_000016.5(ACADM): c.329A > | 34 | ACADM | [′ACTTTTGATGCTTGTTTAATTAGTGRAGAA |
| | G (p.Glu110Gly) | | | TTGGCTTATGGATGTACAGGG′] |
| 5000 | NM_000016.5(ACADM): c.797A > | 34 | ACADM | [′CCTAAAGAAAATGTTTTAATTGGTGRCGG |
| | G (p.Asp266Gly) | | | AGCTGGTTTCAAAGTTGCAATG′] |
| 5001 | NM_000532.4(PCCB): c.655 − 2A > G | 5096 | PCCB | [′GACTGTTCTGGAAATCTTTTATTTCRGGAC |
| | | | | ACCTCCTACCTGTTCATCACT′] |
| 5002 | NM_004453.3(ETFDH): c.929A > G | 2110 | ETFDH | [′CATACCTATGGAGGATCTTTCCTCTRTCAT |
| | (p.Tyr310Cys) | | | TTGAATGAAGGTGAACCCCTA′] |
| 5003 | NM_000255.3(MUT): c.1885A > G | 4594 | MUT | [′AAAAATGGGACAAGATGGCCATGACRGAG |
| | (p.Arg629Gly) | | | GAGCAAAAGTTATTGCTACAGG′] |
| 5004 | NM_000255.3(MUT): c.329A > G | 4594 | MUT | [′TTTAGGCCCTGGACCATCCGCCAGTRTGCT |
| | (p.Tyr110Cys) | | | GGTTTTAGTACTGTGGAAGAA′] |
| 5005 | NM_000017.3(ACADS): c.1108A > | 35 | ACADS | [′TCAGGCCATCCAGATCCTGGGCGGCRTGG |
| | G (p.Met370Val) | | | GCTACGTGACAGAGATGCCGGC′] |
| 5006 | NM_174917.4(ACSF3): c.1A > G | 197322 | ACSF3 | [′TCCAGCTCGGCCGCCTGTCAGTGCARTGCT |
| | (p.Met1Val) | | | GCCCCATGTGGTGCTCACCTT′] |
| 5007 | NM_000531.5(OTC): c.919A > G | 5009 | OTC | [′GACATTTTTACACTGCTTGCCCAGARAGCC |
| | (p.Lys307Glu) | | | AGAAGAAGTGGATGATGAAGT′] |
| 5008 | NM_000030.2(AGXT): c.248A > G | 189 | AGXT | [′ACACTGGTCATCTCTGGCTCGGGACRCTGT |
| | (p.His83Arg) | | | GCCCTGGAGGCCGCCCTGGTC′] |
| 5009 | NM_000030.2(AGXT): c.424 − 2A > G | 189 | AGXT | [′CACCCACAGCCGTCCCTGCTTCCTCRGGGC |
| | (p.Gly_142Gln145del) | | | CTGGCCCAGCACAAGCCAGTG′] |
| 5010 | NM_000030.2(AGXT): c.596 − 2A > G | 189 | AGXT | [′CGTCCCGAGCAAACCACCCATCTACRGGC |
| | | | | ATCGACATCCTGTACTCGGGCT′] |
| 5011 | NM_000030.2(AGXT): c.777 − 2A > G | 189 | AGXT | [′TGGACCAAGCCCCCTCGTGTCTTCCRGGTA |
| | | | | CCATCACACAATCCCCGTCAT′] |
| 5012 | NM_012203.1(GRHPR): c.84 − 2A > G | 9380 | GRHPR | [′CTCCTGAGGGCCTCCCTTTCCCCGCRGCTG |
| | | | | TGAGGTGGAGCAGTGGGACTC′] |
| 5013 | NM_012203.1(GRHPR): c.934A > G | 9380 | GRHPR | [′CACCATGTCCTTGTTGGCAGCTAACRACTT |
| | (p.Asn312Asp) | | | GCTGGCTGGCCTGAGAGGGGA′] |
| 5014 | NM_203290.2(POLR1C): c.221A > | 9533 | POLR1C | [′GTGGGAATTGACGCAGCCATTGCCARTGC |
| | G (p.Asn74Ser) | | | TTTTCGACGAATTCTGCTAGCT′] |
| 5015 | NM_006516.2(SLC2A1): c.848A > G | 6513 | SLC2A1 | [′GCTGTGGTGCTGCAGCTGTCCCAGCRGCTG |
| | (p.Gln283Arg) | | | TCTGGCATCAACGCTGTGAGT′] |
| 5016 | NM_006516.2(SLC2A1): c.19 − | 6513 | SLC2A1 | [′ATAACAGTGTGGTTTGTTTCTCCGCRGAAG |
| | 2A > G | | | CTGACGGGTCGCCTCATGCTG′] |
| 5017 | NM_021007.2(SCN2A): c.387 − | 6326 | SCN2A | [′ACTTTGTCTTCCTTGACGATATTCTRCTTTA |
| | 2A > G | | | TTCAATATGCTCATTATGTG′] |
| 5018 | NM_021007.2(SCN2A): c.851A > G | 6326 | SCN2A | [′AATAAATGTTTGCAATGGCCTCCAGRTAAT |
| | (p.Asp284Gly) | | | TCTTCCTTTGAAATAAATATC′] |
| 5019 | NM_021007.2(SCN2A): c.4036A > G | 6326 | SCN2A | [′CATGAATGTACTTCTGGTTTGTCTGRTCTTT |
| | (p.Ile1346Val) | | | TGGCTAATATTCAGTATCAT′] |
| 5020 | NM_001165963.1(SCN1A): c.4476 + | −1 | — | [′TAATTTCAACCAGCAGAAAAAGAAGDTAA |
| | 1A > G | | | GTATTTCTAATATTTTCTCTCC′] |
| 5021 | NM_001165963.1(SCN1A): c.1277A > | 6323 | SCN1A | [′ATCCTGGCTGTGGTGGCCATGGCCTRCGAG |
| | G (p.Tyr426Cys) | | | GAACAGAATCAGGCCACCTTG′] |
| 5022 | NM_000391.3(TPP1): c.833A > G | 1200 | TPP1 | [′GGGATTGAGGCCAGTCTAGATGTGCRGTA |
| | (p.Gln278Arg) | | | CCTGATGAGTGCTGGTGCCAAC′] |
| 5023 | NM_017882.2(CLN6): c.767A > G | 54982 | CLN6 | [′GGAGAAGAGGAAGAGGCCGTTGCTGYCCA |
| | (p.Asp256Gly) | | | GGAAGAGGCGCTTGCGCTTCTG′] |
| 5024 | NM_002693.2(POLG): c.3470A > G | 5428 | POLG | [′GGGCCCCGCATACCTGGTCAAGAGGYTGG |
| | (p.Asn1157Ser) | | | TGATCTGCAAGGCCAGGGCAGC′] |
| 5025 | NM_002693.2(POLG): c.2840A > G | 5428 | POLG | [′GTGGGCATCAGCCGTGAGCATGCCARAAT |
| | (p.Lys947Arg) | | | CTTCAACTACGGCCGCATCTAT′] |
| 5026 | NM_002693.2(POLG): c.2636A > G | 5428 | POLG | [′CACAAGGGTGTAGCCAGGTGGGGCCYGCA |
| | (p.Gln879Arg) | | | CCATGGCTTTCAACTCACTGCC′] |
| 5027 | NM_000833.4(GRIN2A): c.2449A > | 2903 | GRIN2A | [′GAGCAGCCAGCTGGACATTGACAACRTGG |
| | G (p.Met817Val) | | | CGGGCGTATTCTACATGCTGGC′] |
| 5028 | NM_000833.4(GRIN2A): c.1930A > | 2903 | GRIN2A | [′CTTCTTCGCTGTCATATTCCTGGCTRGCTA |
| | G (p.Ser644Gly) | | | CACAGCCAATCTGGCTGCCTT′] |
| 5029 | NM_000156.5(GAMT): c.1A > G | 2593 | GAMT | [′GTCGGGTCGCCGTCCAGCCTGCAGCRTGA |
| | (p.Met1Val) | | | GCGCCCCCAGCGCGACCCCCAT′] |
| 5030 | NM_172107.2(KCNQ2): c.848A > G | 3785 | KCNQ2 | [′CTGACCACCATTGGCTACGGGGACARGTA |
| | (p.Lys283Arg) | | | CCCCCAGACCTGGAACGGCAGG′] |
| 5031 | NM_172107.2(KCNQ2): c.611A > G | 3785 | KCNQ2 | [′GCGCTCCGGAGCCTGCGCTTCCTGCRGATT |
| | (p.Gln204Arg) | | | CTGCGGATGATCCGCATGGAC′] |
| 5032 | NM_172107.2(KCNQ2): c.297 − | 3785 | KCNQ2 | [′CTGAGAGCGCGCGTTCCCTGCCCCCRGGTT |
| | 2A > G | | | CCTCCTGGTTTTCTCCTGCCT′] |
| 5033 | NM_001105243.1(PCDH19): c.1019A > | 57526 | PCDH19 | [′GTCACCGTCAGCGTGCTGGACACCARTGA |
| | G (p.Asn340Ser) | | | CAATCCGCCGGTCATCAACCTG′] |
| 5034 | NM_001105243.1(PCDH19): c.695A > | 57526 | PCDH19 | [′CTTAGTATCAAGGTGACCGACTCCADTGA |
| | G (p.Asn232Ser) | | | CAACAACCCGGTGTTTAGCGAG′] |
| 5035 | NM_052859.3(RFT1): c.454A > G | 91869 | RFT1 | [′TTCACAGCAGAAGGTGCACTGACCTBGAG |
| | (p.Lys152Glu) | | | CTTCACAAACATATGTGCTTGT′] |
| 5036 | NM_052859.3(RFT1): c.1222A > G | 91869 | RFT1 | [′TCTCCTCCCCAGGTACAATTTTGTGRTGCT |
| | (p.Met408Val) | | | GGCCCTGTCCTCCTCATTCCT′] |
| 5037 | NM_020533.2(MCOLN1): c.1406A > | 57192 | MCOLN1 | [′TCTGAGTGCCTGTTCTCGCTCATCARTGGG |
| | G (p.Asn469Ser) | | | GACGACATGTTTGTGACGTTC′] |
| 5038 | NM_004456.4(EZH2): c.458A > G | 2146 | EZH2 | [′TTCATTGAAGAACTAATAAAAAATTRTGAT |
| | (p.Tyr153Cys) | | | GGGAAAGTACACGGGGATAGA′] |
| 5039 | NM_005045.3(RELN): c.2168A > G | 5649 | RELN | [′ACCACGGATAGAGTAAAAGTTATGGYAAG |
| | (p.Tyr723Cys) | | | AGGAGAGCCTGGAACTGCCAAA] |
| 5040 | NM_006772.2(SYNGAP1): c.388 − | 8831 | SYNGAP1 | [′CCCACCCCATCCCCATTTCCCCCCCRGCAA |
| | 2A > G | | | GGCTTCCTGAGCCGACGGCTA′] |
| 5041 | NM_001080508.2(TBX18): c.487A > | 9096 | TBX18 | [′GATAGGCACTGAGATGATCATCACCRAGG |
| | G (p.Lys163Glu) | | | CCGGCAGGTAATGGGCAAGCTG′] |
| 5042 | NM_004964.2(HDAC1): c.461A > G | 3065 | HDAC1 | [′GAGGCATCTGGCTTCTGTTACGTCARTGAT |
| | (p.Asn154Ser) | | | ATCGTCTTGGCCATCCTGGAA′] |
| 5043 | NM_014946.3(SPAST): c.1168A > G | 6683 | SPAST | [′TGGTCCACCTGGGAATGGGAAGACARTGC |
| | (p.Met390Val) | | | TGGTAAGGGTTCTCTTCAAATT′] |
| 5044 | NM_000314.6(PTEN): c.71A > G | 5728 | PTEN | [′TATCAAGAGGATGGATTCGACTTAGRCTTG |
| | (p.Asp24Gly) | | | ACCTGTATCCATTTCTGCGGC′] |
| 5045 | NM_004380.2(CREBBP): c.4409A > | 1387 | CREBBP | [′GGGTCCTGCAGGTATGTGACAGGGCRCAT |
| | G (p.His1470Arg) | | | CTGGGCCTGTCCTCCAAGTGAA′] |
| 5046 | NM_018206.4(VPS35): c.1463A > G | 55737 | VPS35 | [′GATCCAGAAGATTTTGCTGATGAGCRGAG |
| | (p.Gln488Arg) | | | CCTTGTGGGCCGCTTCATTCAT′] |
| 5047 | NM_152296.4(ATP1A3): c.971A > G | 478 | ATP1A3 | [′GGCATCATCGTGGCCAATGTCCCAGRGGG |
| | (p.Glu324Gly) | | | TCTGCTGGCCACTGTCACTGTA′] |
| 5048 | NM_172107.2(KCNQ2): c.710A > G | 3785 | KCNQ2 | [′TCTCAGGAGCTGGTCACTGCCTGGTRCATC |
| | (p.Tyr237Cys) | | | GGCTTCCTTTGTCTCATCCTG′] |
| 5049 | NM_001017980.3(VMA21): c.163 + | 203547 | VMA21 | [′ACTAAATCTTACATATTTGAAGGTARTCTT |
| | 4A > G | | | AGACCCATTAAAACAAGATGT′] |
| 5050 | NM_000489.4(ATRX): c.740A > G | 546 | ATRX | [′TTCTGCAAGAAATGCATTCTACGCARCCTT |
| | (p.Asn247Ser) | | | GGTCGAAAGGAGTTGTCCACA′] |
| 5051 | NM_021147.4(CCNO): c.716A > G | 10309 | CCNO | [′CCCACCATTAGCTTCTTCCTGGAGCRTTTC |
| | (p.His239Arg) | | | ACGCACGCTCGCGTGGAGGCG′] |
| 5052 | NM_031924.4(RSPH3): c.631 − | 83861 | RSPH3 | [′CTCTAGAGAATCAGGCCGTCCGAGCYAAC |
| | 2A > G | | | AGTGATAGAAAATACTTCTAGA′] |
| 5053 | NM_000069.2(CACNA1S): c.3526 − | 779 | CACNA1S | [′TCGCTTTCCCATCCTTTTCCTTCCCRGGGCT |
| | 2A > G | | | ACTTTGGAGACCCCTGGAAT′] |
| 5054 | NM_000533.4(PLP1): c.1A > G | 5354 | PLP1 | [′CAATTGGAGTCAGAGTCCCAAAGACRTGG |
| | (p.Met1Val) | | | GTAAGTTTCAAAAACTTTAGCA′] |
| 5055 | NM_207352.3(CYP4V2): c.1396A > | 285440 | CYP4V2 | [′CGTGCCCTTCTCTGCTGGCCCCAGGRACTG |
| | G (p.Asn466Asp) | | | TATAGGTTTGTATCCATCTGA′] |
| 5056 | NM_033409.3(SLC52A3): c.403A > | 113278 | SLC52A3 | [′ACAAAGAAGGTGGTGAGGTAGTAGGYGG |
| | G (p.Thr135Ala) | | | GCAGCCGGCTCATGAACGGCAGG′] |
| 5057 | NM_033409.3(SLC52A3): c.62A > G | 113278 | SLC52A3 | [′CAGGGGCAGCTCTACCCAGAGCCCAYTGA |
| | (p.Asn21Ser) | | | TGGTCACCCAGGAGCCCATTCC′] |
| 5058 | NM_017662.4(TRPM6): c.3173A > | 140803 | TRPM6 | [′CAAGCTGTCTACCTCTTCGTGCAATRTATC |
| | G (p.Tyr1058Cys) | | | ATCATGGTGAACCTGTTGATT′] |
| 5059 | NM_006642.3(SDCCAG8): c.221 − | 10806 | SDCCAG8 | [′AATAAACCCTCTGCTTTTGCTCTATRGTTA |
| | 2A > G | | | ATCAGCTCAAAGATTTGTTGC′] |
| 5060 | NM_022455.4(NSD1): c.5990A > G | 64324 | NSD1 | [′CAAGAACATGATATCACTAATTTCTRTATG |
| | (p.Tyr1997Cys) | | | CTCACCCTAGACAAAGTAAGT′] |
| 5061 | NM_000352.4(ABCC8): c.563A > G | 6833 | ABCC8 | [′GGGATGCTGCTCCTCGTGGAGGTCARTGTC |
| | (p.Asn188Ser) | | | ATCAGGGTGAGGGTAAGCAGG] |
| 5062 | NM_000275.2(OCA2): c.1427A > G | 4948 | OCA2 | [′GATGGCAGTGGCAGCTCCTCCAATGYTTGT |
| | (p.Asn476Ser) | | | GAAGATCACTTCTGCAATCAG′] |
| 5063 | NM_001848.2(COL6A1): c.1003 − | 1291 | COL6A1 | [′ATTTTCTAGTTTTCTTCCTCTTTCCRGGGGG |
| | 2A > G | | | AGATGGGGTACCCAGGCCTG′] |
| 5064 | NM_003560.2(PLA2G6): c.1349 − | 8398 | PLA2G6 | [′CAGCATGCCCTGCTCTGTGCCTCACRGAAC |
| | 2A > G | | | TACAGGATCTCATGCACATCT′] |
| 5065 | NM_178151.2(DCX): c.280A > G | 1641 | DCX | [′TGACCTGACGCGATCTCTGTCTGACRACAT |
| | (p.Asn94Asp) | | | CAACCTGCCTCAGGGAGTGCG′] |
| 5066 | NM_000425.4(L1CAM): c.2351A > | 3897 | L1CAM | [′TCCAACACGTCCACCTTCGTGCCCTRTGAG |
| | G (p.Tyr784Cys) | | | ATCAAAGTCCAGGCCGTCAAC′] |
| 5067 | NM_000052.6(ATP7A): c.2173 − | 538 | ATP7A | [′TCAATGATTATCATTCCTATATTGCRGTTTT |
| | 2A > G | | | TCGGAGGCTGGTACTTCTAC′] |
| 5068 | NM_020247.4(ADCK3): c.1286A > | 56997 | ADCK3 | [′CTGCTGAAGGGCCACCCCTTCTTCTRTGTG |
| | G (p.Tyr429Cys) | | | CCTGAGATTGTGGATGAGCTC′] |
| 5069 | NM_000143.3(FH): c.554A > G | 2271 | FH | [′AAACAGCAAAGCTCACATACTGACCYGGC |
| | (p.Gln185Arg) | | | TTTTATTAACATGATCGTTGGG′] |
| 5070 | NM_033109.4(PNPT1): c.1453A > G | 87178 | PNPT1 | [′AAACTTCCGCCACATGCAGATGCCAKAGA |
| | (p.Met485Val) | | | AGATGACCCTATAGAAAGAAAA′] |
| 5071 | NM_005888.3(SLC25A3): c.158 − | 5250 | SLC25A3 | [′TACTTACTTGATTTTTTTTTTTCCARTCAAA |
| | 9A > G | | | CAGAGCAGTATAGCTGTGAC′] |
| 5072 | NM_181426.1(CCDC39): c.610 − | 339829 | CCDC39 | [′TTGTGCTGCTTTATCCAATTCTAACYGTCA |
| | 2A > G | | | AACAGAGAGCAAAGAACATTT′] |
| 5073 | NM_153704.5(TMEM67): c.725A > | 91147 | TMEM67 | [′ATTGTTCTGTTGTAGGTATATGCCARTCTA |
| | G (p.Asn242Ser) | | | ACATCTTGTCAAGCTCTTGGA′] |
| 5074 | NM_000166.5(GJB1): c.305A > G | 2705 | GJB1 | [′CACGTGGCTCACCAGCAACACATAGRGAA |
| | (p.Glu102Gly) | | | GAAAATGCTACGGCTTGAGGGC′] |
| 5075 | NM_019098.4(CNGB3): c.1193A > | 54714 | CNGB3 | [′AATTAAAGTTCGAACTGCCCAATAAYAAC |
| | G (p.Tyr398Cys) | | | ATCTCAGATACCTGTGAAAACA′] |
| 5076 | NM_000070.2(CAPN3): c.1194 − | 825 | CAPN3 | [′CCATATGGCTCTCTCTCTTCTTCCARCCTCT |
| | 9A > G | | | CAGGATGTCCTATGAGGATT′] |
| 5077 | NM_002860.3(ALDH18A1): c.2345A > | 5832 | ALDH18A1 | [′AGGAATAGGGAGGTTCTCATGAAGABATT |
| | G (p.Tyr782Cys) | | | TTAAACTTCCATGCTCTGAGAA′] |
| 5078 | NM_001414.3(EIF2B1): c.824A > G | 1967 | EIF2B1 | [′CAGAGTGATTAAGGAAGGGGCAGTGYAGT |
| | (p.Tyr275Cys) | | | CGACCCACGGATGCTCCTCTTT′] |
| 5079 | NM_182896.2(ARL13B): c.461A > G | 200894 | ARL13B | [′TGTCTATCTCTGGAAAAATTGGTCARTGAG |
| | (p.Asn154Ser) | | | CACAAGTGCCTGTGTCAGATA′] |
| 5080 | NM_001134831.1(AHI1): c.1152 − | 54806 | AHI1 | [′TAGTAAGATGAAACAGGCCGTCCACYGTA |
| | 2A > G | | | CAAAAAAAGATACTTCCATTAA′] |
| 5081 | NM_153704.5(TMEM67): c.978 + 3A > | 91147 | TMEM67 | [′TCAGTTTTAAAGGAGAAAACCAGGTRAAA |
| | G | | | GTGTCTAATATCATTAGAGGAT′] |
| 5082 | NM_015681.3(B9D1): c.95A > G | 27077 | B9D1 | [′CCAGTCCTGGCCGTACACAAAGCAGYACT |
| | (p.Tyr32Cys) | | | TGCAGTAGAGGTCATCATACTC′] |
| 5083 | NM_014049.4(ACAD9): c.1A > G | 28976 | ACAD9 | [′CTGAGGCTGGGGAACATCGGGCAGCWTGA |
| | (p.Met1Val) | | | GCGGCTGCGGGCTCTTCCTGCG′] |

TABLE 8
xCas9v3 Mutations (K294R/Q1256K Series)

| xCas9 3.0 | xCas9 3.1 | xCas9 3.2 | xCas9 3.3 | xCas9 3.4 |
|---|---|---|---|---|
| | | N175T | | |
| P230F | | | | |
| | | | D257N | |
| S267G | | S267G | S267G | |
| K294R | K294R | K294R | K294R | K294R |
| | | | T466A | |
| E480K | E480K | E480K | E480K | E480K |
| E543D | E543D | E543D | E543D | E543D |
| | A711E | | | |
| | E1207G | | I1063V | |
| E1219V | E1219V | E1219V | E1219V | E1219V |
| Q1256K | Q1256K | Q1256K | Q1256K | Q1256K |

TABLE 9
xCas9v3 Mutations (A262T/S409I Series)

| xCas9 3.5 | xCas9 3.6 | xCas9 3.7 | xCas9 3.8 | xCas9 3.9 | xCas9 3.10 | xCas9 3.11 | xCas9 3.12 |
|---|---|---|---|---|---|---|---|
| E108G | E108G | | | | | E108G | E108G |
| | S217A | | | | | | |
| A262T | A262T | A262T | A262T | A262T | A262T | A262T | A262T |
| | | R324L | | | | | |
| S409I | S409I | S409I | S409I | S409I | S409I | S409I | S409I |
| E480K | E480K | E480K | E480K | E480K | E480K | E480K | E480K |
| E543D | E543D | E543D | E543D | E543D | E543D | E543D | E543D |
| | | | D605D | D605D | | | |
| K673E | | | | | | K673E | |
| M694I | M694I | M694I | M694I | M694I | M694I | M694I | M694I |
| E1219V | E1219V | E1219V | E1219V | E1219V | E1219V | E1219V | E1219V |
| | | | H1264Y | | | | |
| L1365I | L1365I | | | | L1365I | | L1365I |

TABLE 10
PAM Depletion Scores (xCas9v3.0-3.6 Mutations)

| | 22-4 | 22-10 | 22-11 | 22-14 | 22-21 | 22-65 | 22-66 |
|---|---|---|---|---|---|---|---|
| | xCas9 3.0 | xCas9 3.1 | xCas9 3.2 | xCas9 3.3 | xCas9 3.4 | xCas9 3.5 | xCas9 3.6 |
| AAA | 0.61 | 0.69 | 1.38 | 0.90 | 0.98 | 1.29 | 1.47 |
| AAC | 0.67 | 0.77 | 0.78 | 0.71 | 0.93 | 0.80 | 1.55 |
| AAG | 13.88 | 15.70 | 32.70 | 28.75 | 22.79 | 48.60 | 92.02 |
| AAT | 0.52 | 0.59 | 0.87 | 0.63 | 0.76 | 0.87 | 0.84 |
| ACA | 0.52 | 0.52 | 0.48 | 0.51 | 0.57 | 0.59 | 0.72 |
| ACC | 0.54 | 0.50 | 0.48 | 0.48 | 0.47 | 0.46 | 0.55 |
| ACG | 10.15 | 30.07 | 41.38 | 108.50 | 32.19 | 25.52 | 158.44 |
| ACT | 0.46 | 0.47 | 0.39 | 0.41 | 0.44 | 0.40 | 0.50 |
| AGA | 13.22 | 28.30 | 34.42 | 57.31 | 38.26 | 31.93 | 170.85 |
| AGC | 7.55 | 5.84 | 11.17 | 8.69 | 7.63 | 13.13 | 5.54 |
| AGG | 12.23 | 188.82 | 37.97 | 182.49 | 194.93 | 82.99 | 355.32 |
| AGT | 13.19 | 9.75 | 17.03 | 16.09 | 10.90 | 19.84 | 22.47 |
| ATA | 0.58 | 0.56 | 0.51 | 0.52 | 0.51 | 0.53 | 0.49 |
| ATC | 0.52 | 0.50 | 0.45 | 0.45 | 0.47 | 0.42 | 0.38 |
| ATG | 11.38 | 14.85 | 23.55 | 40.11 | 20.48 | 30.27 | 108.77 |
| ATT | 0.48 | 0.46 | 0.43 | 0.42 | 0.43 | 0.41 | 0.39 |
| CAA | 1.55 | 2.00 | 6.63 | 5.06 | 3.42 | 6.29 | 4.66 |
| CAC | 0.57 | 0.65 | 0.99 | 0.75 | 0.86 | 0.93 | 3.20 |
| CAG | 15.05 | 11.83 | 26.90 | 26.86 | 22.15 | 32.07 | 137.31 |
| CAT | 4.41 | 6.06 | 17.67 | 7.55 | 6.30 | 8.13 | 7.87 |
| CCA | 0.48 | 0.46 | 0.41 | 0.43 | 0.42 | 0.40 | 0.39 |
| CCC | 0.53 | 0.51 | 0.46 | 0.45 | 0.45 | 0.43 | 0.44 |
| CCG | 3.35 | 2.67 | 6.87 | 6.98 | 4.69 | 8.56 | 5.44 |
| CCT | 0.53 | 0.50 | 0.45 | 0.49 | 0.46 | 0.43 | 0.38 |
| CGA | 9.23 | 49.45 | 43.50 | 106.20 | 62.04 | 27.17 | 116.32 |
| CGC | 13.79 | 8.59 | 17.62 | 15.06 | 12.16 | 21.40 | 11.61 |
| CGG | 16.85 | 223.84 | 46.41 | 346.14 | 96.28 | 90.82 | 252.73 |
| CGT | 12.66 | 23.87 | 36.06 | 42.02 | 20.18 | 27.33 | 179.69 |
| CTA | 0.54 | 0.50 | 0.45 | 0.47 | 0.47 | 0.45 | 0.49 |
| CTC | 0.51 | 0.48 | 0.43 | 0.44 | 0.45 | 0.42 | 0.38 |
| CTG | 5.39 | 3.40 | 6.92 | 8.28 | 5.95 | 11.34 | 4.20 |
| CTT | 0.52 | 0.52 | 0.46 | 0.46 | 0.44 | 0.44 | 0.82 |
| GAA | 10.98 | 7.67 | 14.45 | 11.25 | 9.75 | 11.86 | 6.86 |
| GAC | 0.88 | 1.35 | 4.85 | 2.92 | 2.40 | 5.25 | 4.15 |
| GAG | 11.85 | 55.33 | 39.91 | 118.83 | 109.84 | 85.83 | 390.44 |
| GAT | 7.69 | 5.68 | 10.55 | 9.22 | 6.41 | 11.03 | 9.53 |
| GCA | 0.49 | 0.49 | 0.47 | 0.52 | 0.53 | 0.59 | 0.61 |
| GCC | 0.53 | 0.52 | 0.50 | 0.50 | 0.49 | 0.46 | 0.52 |
| GCG | 13.68 | 13.44 | 22.56 | 46.72 | 32.75 | 35.86 | 97.69 |
| GCT | 0.51 | 0.50 | 0.45 | 0.48 | 0.46 | 0.45 | 0.61 |
| GGA | 9.74 | 82.32 | 39.45 | 172.39 | 102.30 | 85.53 | 77.46 |
| GGC | 12.21 | 10.04 | 17.84 | 15.18 | 14.04 | 27.07 | 17.46 |
| GGG | 18.90 | 381.76 | 70.36 | 281.12 | 164.21 | 111.87 | 718.40 |
| GGT | 10.87 | 22.11 | 32.25 | 88.31 | 40.66 | 40.16 | 257.92 |
| GTA | 0.56 | 0.59 | 0.77 | 0.72 | 0.76 | 1.03 | 1.55 |
| GTC | 0.52 | 0.51 | 0.46 | 0.52 | 0.49 | 0.45 | 0.58 |
| GTG | 11.43 | 16.42 | 28.54 | 72.25 | 33.31 | 47.65 | 382.48 |
| GTT | 0.48 | 0.45 | 0.41 | 0.43 | 0.43 | 0.42 | 0.76 |
| TAA | 0.58 | 0.67 | 1.59 | 0.99 | 1.04 | 1.69 | 1.53 |
| TAC | 0.56 | 0.54 | 0.51 | 0.51 | 0.52 | 0.50 | 0.44 |
| TAG | 11.34 | 10.19 | 15.99 | 22.04 | 15.24 | 27.89 | 35.59 |
| TAT | 0.56 | 0.64 | 1.26 | 0.85 | 0.89 | 1.21 | 2.60 |
| TCA | 0.50 | 0.48 | 0.43 | 0.45 | 0.46 | 0.45 | 0.44 |
| TCC | 0.50 | 0.48 | 0.43 | 0.46 | 0.44 | 0.42 | 0.47 |
| TCG | 10.38 | 8.24 | 14.95 | 15.64 | 9.96 | 15.57 | 34.80 |
| TCT | 0.52 | 0.50 | 0.45 | 0.44 | 0.46 | 0.41 | 0.46 |
| TGA | 9.68 | 61.64 | 44.45 | 188.12 | 99.42 | 46.89 | 186.41 |
| TGC | 13.64 | 9.07 | 15.11 | 11.69 | 11.22 | 15.01 | 8.15 |
| TGG | 12.90 | 223.88 | 63.67 | 259.65 | 115.56 | 80.51 | 210.65 |
| TGT | 11.53 | 18.90 | 31.99 | 36.30 | 18.72 | 21.90 | 122.87 |
| TTA | 0.61 | 0.57 | 0.52 | 0.54 | 0.51 | 0.52 | 0.30 |
| TTC | 0.53 | 0.50 | 0.44 | 0.45 | 0.44 | 0.43 | 0.27 |
| TTG | 13.57 | 6.61 | 10.15 | 13.27 | 7.38 | 14.26 | 12.24 |
| TTT | 0.53 | 0.49 | 0.44 | 0.45 | 0.48 | 0.44 | 0.28 |

PAM Depletion Scores (xCas9v3.7-3.12 Mutations)

| | 22-68 | 22-75 | 22-78 | 22-82 | 22-87 | 22-90 |
|---|---|---|---|---|---|---|
| | xCas9 3.7 | xCas9 3.8 | xCas9 3.9 | xCas9 3.10 | xCas9 3.11 | xCas9 3.12 |
| AAA | 0.92 | 1.00 | 4.30 | 0.63 | 0.48 | 1.67 |
| AAC | 8.72 | 3.59 | 1.55 | 1.59 | 0.94 | 1.34 |
| AAG | 23.44 | 20.16 | 16.46 | 10.63 | 26.46 | 22.44 |
| AAT | 1.03 | 0.89 | 1.22 | 1.07 | 0.76 | 0.96 |
| ACA | 0.80 | 0.92 | 0.52 | 0.68 | 1.09 | 0.83 |
| ACC | 0.42 | 1.37 | 0.32 | 1.03 | 0.81 | 0.53 |
| ACG | 11.20 | 6.65 | 21.80 | 1.38 | 1.23 | 0.88 |
| ACT | 0.27 | 0.38 | 0.24 | 0.88 | 0.54 | 0.66 |
| AGA | 11.63 | 11.95 | 14.60 | 0.89 | 1.42 | 1.78 |
| AGC | 1.03 | 11.25 | 8.05 | 1.54 | 1.77 | 2.39 |
| AGG | 8.05 | 11.61 | 21.28 | 1.37 | 33.28 | 113.98 |
| AGT | 11.10 | 6.85 | 12.73 | 0.39 | 2.70 | 0.91 |
| ATA | 0.73 | 0.79 | 0.58 | 1.04 | 0.70 | 0.94 |
| ATC | 0.43 | 0.47 | 0.28 | 0.63 | 0.86 | 0.87 |
| ATG | 15.46 | 13.03 | 4.76 | 2.21 | 2.39 | 1.73 |
| ATT | 0.62 | 0.30 | 0.53 | 0.59 | 0.91 | 0.74 |
| CAA | 8.96 | 6.08 | 1.97 | 1.46 | 0.53 | 0.67 |
| CAC | 1.65 | 1.31 | 0.81 | 0.60 | 0.75 | 0.73 |
| CAG | 3.46 | 1.99 | 1.44 | 23.50 | 9.51 | 13.76 |
| CAT | 20.52 | 44.57 | 18.70 | 16.29 | 15.96 | 0.36 |
| CCA | 0.40 | 0.31 | 0.64 | 0.87 | 0.55 | 0.64 |
| CCC | 0.35 | 0.54 | 0.55 | 1.12 | 0.56 | 0.69 |
| CCG | 4.35 | 5.28 | 5.57 | 1.37 | 0.94 | 0.83 |
| CCT | 0.40 | 1.04 | 0.36 | 1.22 | 0.67 | 0.59 |
| CGA | 4.47 | 7.60 | 5.26 | 1.35 | 1.36 | 2.02 |
| CGC | 13.35 | 10.98 | 5.45 | 4.03 | 5.37 | 3.66 |
| CGG | 6.06 | 5.52 | 25.23 | 31.85 | 19.44 | 34.65 |
| CGT | 17.13 | 7.41 | 17.31 | 0.63 | 1.44 | 0.66 |
| CTA | 0.76 | 0.50 | 0.50 | 1.97 | 1.45 | 1.05 |
| CTC | 0.40 | 0.26 | 0.65 | 0.58 | 0.45 | 0.81 |
| CTG | 5.64 | 9.49 | 6.82 | 1.35 | 1.41 | 2.11 |
| CTT | 0.50 | 0.63 | 0.68 | 0.54 | 0.73 | 0.88 |
| GAA | 9.81 | 6.07 | 4.68 | 2.07 | 0.87 | 1.09 |
| GAC | 3.91 | 3.95 | 2.82 | 0.44 | 0.86 | 0.56 |
| GAG | 23.26 | 21.32 | 9.88 | 16.93 | 18.42 | 40.73 |
| GAT | 5.06 | 9.85 | 1.07 | 0.75 | 1.06 | 0.63 |
| GCA | 0.56 | 0.81 | 0.79 | 1.46 | 0.44 | 0.89 |
| GCC | 0.35 | 0.52 | 0.71 | 0.65 | 3.67 | 0.73 |
| GCG | 16.11 | 12.53 | 9.43 | 1.59 | 1.98 | 2.22 |
| GCT | 0.42 | 0.88 | 0.27 | 0.66 | 1.14 | 0.76 |
| GGA | 3.01 | 18.40 | 33.07 | 27.28 | 16.20 | 46.82 |
| GGC | 6.03 | 3.83 | 11.69 | 8.03 | 22.56 | 3.92 |
| GGG | 12.16 | 10.26 | 15.08 | 17.30 | 25.85 | 128.03 |
| GGT | 11.25 | 13.77 | 2.94 | 12.71 | 16.11 | 16.22 |
| GTA | 1.38 | 1.08 | 1.24 | 0.75 | 3.52 | 1.09 |
| GTC | 0.96 | 0.31 | 0.50 | 0.93 | 0.72 | 0.81 |
| GTG | 6.68 | 17.93 | 26.86 | 9.93 | 9.61 | 2.72 |
| GTT | 0.45 | 0.33 | 0.99 | 0.65 | 1.61 | 1.01 |
| TAA | 3.04 | 2.16 | 1.84 | 1.21 | 1.08 | 0.68 |
| TAC | 0.61 | 0.52 | 0.68 | 0.95 | 0.68 | 0.86 |
| TAG | 4.76 | 15.71 | 1.10 | 8.15 | 8.25 | 8.87 |
| TAT | 1.62 | 2.10 | 1.01 | 0.73 | 0.74 | 0.66 |
| TCA | 0.41 | 0.66 | 0.58 | 0.46 | 0.77 | 0.68 |
| TCC | 0.54 | 0.29 | 0.38 | 1.36 | 0.86 | 0.82 |
| TCG | 1.41 | 4.20 | 9.11 | 0.84 | 0.46 | 0.69 |
| TCT | 0.47 | 0.44 | 0.38 | 0.60 | 1.00 | 0.94 |
| TGA | 22.42 | 5.39 | 15.72 | 1.78 | 3.13 | 3.69 |
| TGC | 6.78 | 6.81 | 11.35 | 2.41 | 6.55 | 4.08 |
| TGG | 20.36 | 11.36 | 11.56 | 9.97 | 21.64 | 19.87 |
| TGT | 10.32 | 8.82 | 21.17 | 0.94 | 0.79 | 0.73 |
| TTA | 0.65 | 0.29 | 0.77 | 0.94 | 1.35 | 0.75 |
| TTC | 0.62 | 1.07 | 0.55 | 0.86 | 1.07 | 0.58 |
| TTG | 8.41 | 6.07 | 9.07 | 0.67 | 0.56 | 0.72 |
| TTT | 0.43 | 0.56 | 0.44 | 0.68 | 0.60 | 0.75 |

### REFERENCES

[0347] 1. Humbert O, Davis L, Maizels N. Targeted gene therapies: tools, applications, optimization. Crit Rev Biochem Mol. 2012; 47(3):264-81. PMID: 22530743.
[0348] 2. Perez-Pinera P, Ousterout D G, Gersbach C A. Advances in targeted genome editing. Curr Opin Chem Biol. 2012; 16(3-4):268-77. PMID: 22819644.
[0349] 3. Urnov F D, Rebar E J, Holmes M C, Zhang H S, Gregory P D. Genome editing with engineered zinc finger nucleases. Nat Rev Genet. 2010; 11(9):636-46. PMID: 20717154.
[0350] 4. Joung J K, Sander J D. TALENs: a widely applicable technology for targeted genome editing. Nat Rev Mol Cell Biol. 2013; 14(1):49-55. PMID: 23169466.
[0351] 5. Charpentier E, Doudna J A. Biotechnology: Rewriting a genome. Nature. 2013; 495, (7439):50-1. PMID: 23467164.
[0352] 6. Pan Y, Xia L, Li A S, Zhang X, Sirois P, Zhang J, Li K. Biological and biomedical applications of engineered nucleases. Mol Biotechnol. 2013; 55(1):54-62. PMID: 23089945.
[0353] 7. De Souza, N. Primer: genome editing with engineered nucleases. Nat Methods. 2012; 9(1):27. PMID: 22312638.
[0354] 8. Santiago Y, Chan E, Liu P Q, Orlando S, Zhang L, Urnov F D, Holmes M C, Guschin D, Waite A, Miller J C, Rebar E J, Gregory P D, Klug A, Collingwood T N. Targeted gene knockout in mammalian cells by using engineered zinc-finger nucleases. Proc Natl Acad Sci USA. 2008; 105(15):5809-14. PMID: 18359850.
[0355] 9. Cargill M, Altshuler D, Ireland J, Sklar P, Ardlie K, Patil N, Lane C R, Lim E P, Kalyanaraman N, Nemesh J, Ziaugra L, Friedland L, Rolfe A, Warrington J, zLipshutz R, Daley G Q, Lander E S. Characterization of single-nucleotide polymorphisms in coding regions of human genes. Nat Genet. 1999; 22(3):231-8. PMID: 10391209.
[0356] 10. Jansen R, van Embden J D, Gaastra W, Schouls L M. Identification of genes that are associated with DNA repeats in prokaryotes. Mol Microbiol. 2002; 43(6): 1565-75. PMID: 11952905.
[0357] 11. Mali P, Esvelt K M, Church G M. Cas9 as a versatile tool for engineering biology. Nat Methods. 2013; 10(10):957-63. PMID: 24076990.
[0358] 12. Jore M M, Lundgren M, van Duijin E, Bultema J B, Westra E R, Waghmare S P, Wiedenheft B, Pul U, Wurm R, Wagner R, Beijer M R, Barendregt A, Shou K, Snijders A P, Dickman M J, Doudna J A, Boekema E J, Heck A J, van der Oost J, Brouns S J. Structural basis for CRISPR RNA-guided DNA recognition by Cascade. Nat Struct Mol Biol. 2011; 18(5):529-36. PMID: 21460843.
[0359] 13. Horvath P, Barrangou R. CRISPR/Cas, the immune system of bacteria and archaea. Science. 2010; 327(5962):167-70. PMID: 20056882.
[0360] 14. Wiedenheft B, Sternberg S H, Doudna J A. RNA-guided genetic silencing systems in bacteria and archaea. Nature. 2012; 482(7385):331-8. PMID: 22337052.
[0361] 15. Gasiunas G, Siksnys V. RNA-dependent DNA endonuclease Cas9 of the CRISPR system: Holy Grail of genome editing? Trends Microbiol. 2013; 21(11):562-7. PMID: 24095303.
[0362] 16. Qi L S, Larson M H, Gilbert L A, Doudna J A, Weissman J S, Arkin A P, Lim W A. Repurposing CRISPR as an RNA-guided platform for sequence-specific control of gene expression. Cell. 2013; 152(5):1173-83. PMID: 23452860.
[0363] 17. Perez-Pinera P, Kocak D D, Vockley C M, Adler A F, Kabadi A M, Polstein L R, Thakore P I, Glass K A, Ousterout D G, Leong K W, Guilak F, Crawford G E, Reddy T E, Gersbach C A. RNA-guided gene activation by CRISPR-Cas9-based transcription factors. Nat Methods. 2013; 10(10):973-6. PMID: 23892895.
[0364] 18. Mali P, Aach J, Stranges P B, Esvelt K M, Moosburner M, Kosuri S, Yang L, Church G M. CAS9 transcriptional activators for target specificity screening and paired nickases for cooperative genome engineering. Nat Biotechnol. 2013; 31(9):833-8. PMID: 23907171.
[0365] 19. Gilbert L A, Larson M H, Morsut L, Liu Z, Brar G A, Torres S E, Stern-Ginossar N, Brandman O, Whitehead E H, Doudna J A, Lim W A, Weissman J S, Qi L S. CRISPR-mediated modular RNA-guided regulation of transcription in eukaryotes. Cell. 2013; 154(2):442-51. PMID: 23849981.
[0366] 20. Larson M H, Gilbert L A, Wang X, Lim W A, Weissman J S, Qi L S. CRISPR interference (CRISPRi) for sequence-specific control of gene expression. Nat Protoc. 2013; 8(11):2180-96. PMID: 24136345.
[0367] 21. Mali P, Yang L, Esvelt K M, Aach J, Guell M, DiCarlo J E, Norville J E, Church G M. RNA-guided human genome engineering via Cas9. Science. 2013; 339(6121):823-6. PMID: 23287722.
[0368] 22. Cole-Strauss A, Yoon K, Xiang Y, Byrne B C, Rice M C, Gryn J, Holloman W K, Kmiec E B. Correction of the mutation responsible for sickle cell anemia by an RNA-DNA oligonucleotide. Science. 1996; 273(5280):1386-9. PMID: 8703073.
[0369] 23. Tagalakis A D, Owen J S, Simons J P. Lack of RNA-DNA oligonucleotide (chimeraplast) mutagenic activity in mouse embryos. Mol Reprod Dev. 2005; 71(2):140-4. PMID: 15791601.
[0370] 24. Ray A, Langer M. Homologous recombination: ends as the means. Trends Plant Sci. 2002; 7(10):435-40. PMID 12399177.
[0371] 25. Britt A B, May G D. Re-engineering plant gene targeting. Trends Plant Sci. 2003; 8(2):90-5. PMID: 12597876.
[0372] 26. Vagner V, Ehrlich S D. Efficiency of homologous DNA recombination varies along the Bacillus subtilis chromosome. J Bacteriol. 1988; 170(9):3978-82. PMID: 3137211.
[0373] 27. Saleh-Gohari N, Helleday T. Conservative homologous recombination preferentially repairs DNA double-strand breaks in the S phase of the cell cycle in human cells. Nucleic Acids Res. 2004; 32(12):3683-8. PMID: 15252152.
[0374] 28. Lombardo A, Genovese P, Beausejour C M, Colleoni S, Lee Y L, Kim K A, Ando D, Urnov F D, Galli C, Gregory P D, Holmes M C, Naldini L. Gene editing in human stem cells using zinc finger nucleases and integrase-defective lentiviral vector delivery. Nat Biotechnol. 2007; 25(11):1298-306. PMID: 17965707.
[0375] 29. Conticello S G. The AID/APOBEC family of nucleic acid mutators. Genome Biol. 2008; 9(6):229. PMID: 18598372.
[0376] 30. Reynaud C A, Aoufouchi S, Faili A, Weill J C. What role for AID: mutator, or assembler of the immunoglobulin mutasome? Nat Immunol. 2003; 4(7):631-8.
[0377] 31. Bhagwat A S. DNA-cytosine deaminases: from antibody maturation to antiviral defense. DNA Repair (Amst). 2004; 3(1):85-9. PMID: 14697763.
[0378] 32. Navaratnam N, Sarwar R. An overview of cytidine deaminases. Int J Hematol. 2006; 83(3):195-200. PMID: 16720547.
[0379] 33. Holden L G, Prochnow C, Chang Y P, Bransteitter R, Chelico L, Sen U, Stevens R C, Goodman M F, Chen X S. Crystal structure of the anti-viral APOBEC3G catalytic domain and functional implications. Nature. 2008; 456(7218):121-4. PMID: 18849968.
[0380] 34. Chelico L, Pham P, Petruska J, Goodman M F. Biochemical basis of immunological and retroviral responses to DNA-targeted cytosine deamination by activation-induced cytidine deaminase and APOBEC3 G. J Biol Chem. 2009; 284(41). 27761-5. PMID: 19684020.
[0381] 35. Pham P, Bransteitter R, Goodman M F. Reward versus risk: DNA cytidine deaminases triggering immunity and disease. Biochemistry. 2005; 44(8):2703-15. PMID 15723516.
[0382] 36. Chen X, Zaro J L, Shen W C. Fusion protein linkers: property, design and functionality. Adv Drug Deliv Rev. 2013; 65(10):1357-69. PMID: 23026637.
[0383] 37. Slaymaker, I. M. et al. Rationally engineered Cas9 nucleases with improved specificity. Science, doi:10.1126/science.aad5227 (2015).
[0384] 38. Kleinstiver, B. P. et al. Engineered CRISPR-Cas9 nucleases with altered PAM specificities. Nature 523, 481-485, doi: 10.1038/nature14592 (2015).
[0385] 39. Pattanayak, V. et al. High-throughput profiling of off-target DNA cleavage reveals RNA-programmed Cas9 nuclease specificity. Nature Biotechnology 31, 839-843, doi:10.1038/nbt.2673 (2013).
[0386] 40. Shcherbakova, D. M. & Verkhusha, V. V. Near-infrared fluorescent proteins for multicolor in vivo imaging. Nature Methods 10, 751-754, doi: 10.1038/nmeth.2521 (2013).
[0387] 41. Kleinstiver, et al., High-fidelity CRISPR-Cas9 nucleases with no detectable genome-wide off-target effects. Nature 529, 490-495 doi:10.1038/nature16526 (2016).

[0388] All publications, patents, patent applications, publication, and database entries (e.g., sequence database entries) mentioned herein, e.g., in the Background, Summary, Detailed Description, Examples, and/or References sections, are hereby incorporated by reference in their entirety as if each individual publication, patent, patent application, publication, and database entry was specifically and individually incorporated herein by reference. In case of conflict, the present application, including any definitions herein, will control.

### EQUIVALENTS AND SCOPE

[0389] Those skilled in the art will recognize, or be able to ascertain using no more than routine experimentation, many equivalents of the embodiments described herein. The scope of the present disclosure is not intended to be limited to the above description, but rather is as set forth in the appended claims.

[0390] Articles such as “a,” “an,” and “the” may mean one or more than one unless indicated to the contrary or otherwise evident from the context. Claims or descriptions that include “or” between two or more members of a group are considered satisfied if one, more than one, or all of the group members are present, unless indicated to the contrary or otherwise evident from the context. The disclosure of a group that includes “or” between two or more group members provides embodiments in which exactly one member of the group is present, embodiments in which more than one members of the group are present, and embodiments in which all of the group members are present. For purposes of brevity those embodiments have not been individually spelled out herein, but it will be understood that each of these embodiments is provided herein and may be specifically claimed or disclaimed.

[0391] It is to be understood that the invention encompasses all variations, combinations, and permutations in which one or more limitation, element, clause, or descriptive term, from one or more of the claims or from one or more relevant portion of the description, is introduced into another claim. For example, a claim that is dependent on another claim can be modified to include one or more of the limitations found in any other claim that is dependent on the same base claim. Furthermore, where the claims recite a composition, it is to be understood that methods of making or using the composition according to any of the methods of making or using disclosed herein or according to methods known in the art, if any, are included, unless otherwise indicated or unless it would be evident to one of ordinary skill in the art that a contradiction or inconsistency would arise.

[0392] Where elements are presented as lists, e.g., in Markush group format, it is to be understood that every possible subgroup of the elements is also disclosed, and that any element or subgroup of elements can be removed from the group. It is also noted that the term “comprising” is intended to be open and permits the inclusion of additional elements or steps. It should be understood that, in general, where an embodiment, product, or method is referred to as comprising particular elements, features, or steps, embodiments, products, or methods that consist, or consist essentially of, such elements, features, or steps, are provided as well. For purposes of brevity those embodiments have not been individually spelled out herein, but it will be understood that each of these embodiments is provided herein and may be specifically claimed or disclaimed.

[0393] Where ranges are given, endpoints are included. Furthermore, it is to be understood that unless otherwise indicated or otherwise evident from the context and/or the understanding of one of ordinary skill in the art, values that are expressed as ranges can assume any specific value within the stated ranges in some embodiments, to the tenth of the unit of the lower limit of the range, unless the context clearly dictates otherwise. For purposes of brevity, the values in each range have not been individually spelled out herein, but it will be understood that each of these values is provided herein and may be specifically claimed or disclaimed. It is also to be understood that unless otherwise indicated or otherwise evident from the context and/or the understanding of one of ordinary skill in the art, values expressed as ranges can assume any subrange within the given range, wherein the endpoints of the subrange are expressed to the same degree of accuracy as the tenth of the unit of the lower limit of the range.

[0394] In addition, it is to be understood that any particular embodiment of the present invention may be explicitly excluded from any one or more of the claims. Where ranges are given, any value within the range may explicitly be excluded from any one or more of the claims. Any embodiment, element, feature, application, or aspect of the compositions and/or methods of the invention, can be excluded from any one or more claims. For purposes of brevity, all of the embodiments in which one or more elements, features, purposes, or aspects is excluded are not set forth explicitly herein.

1. A recombinant Cas9 protein comprising an amino acid sequence that is at least 80%, identical to the amino acid sequence of a Cas9 as provided by any one of SEQ ID NOs: 9-262,
wherein the amino acid sequence of the Cas9 protein comprises at least one mutation in an amino acid residue selected from the group consisting of amino acid residues 262, 267, 294, 405, 409, 480, 543, 694, 1219, 1224, 1256, and 1362 of the amino acid sequence provided in SEQ ID NO: 9, or in a corresponding amino acid residue in any of the amino acid sequences provided in SEQ ID NOs: 10-262, and
wherein the amino acid sequence of the recombinant Cas9 protein is not identical to the amino acid sequence of a naturally occurring Cas9 protein.

2. The Cas9 protein of claim 1 comprising an amino acid sequence that is at least 85% identical to the amino acid sequence of a Cas9 as provided by any one of SEQ ID NOs: 9-262.

3. (canceled)

4. The Cas9 protein of claim 1, wherein the amino acid sequence of the Cas9 protein comprises at least one mutation selected from the group consisting of X262T, X267G, X294R, X405I, X409I, X480K, X543D, X694I, X1219V, X1224K, X1256K, and X1362P of the amino acid sequence provided in SEQ ID NO: 9, or a corresponding mutation in any of the amino acid sequences provided in SEQ ID NOs: 10-262, wherein X represents any amino acid.

5. The Cas9 protein of claim 1, wherein the amino acid sequence of the Cas9 protein comprises at least one mutation selected from the group consisting of A262T, S267G, K294R, F405I, S409I, E480K, E543D, M694I, E1219V, N1224K, Q1256K, and L1362P of the amino acid sequence provided in SEQ ID NO: 9, or a corresponding mutation in any of the amino acid sequences provided in SEQ ID NOs: 10-262.

6-92. (canceled)

93. A recombinant Cas9 protein comprising an amino acid sequence that is at least 80%, identical to the amino acid sequence of a Cas9 as provided by any one of SEQ ID NOs: 9-262,
wherein the amino acid sequence of the Cas9 protein comprises at least one mutation in an amino acid residue selected from the group consisting of amino acid residues 122, 137, 182, 262, 294, 409, 480, 543, 660, 694, 1219, and 1329 of the amino acid sequence provided in SEQ ID NO: 9, or in a corresponding amino acid residue in any of the amino acid sequences provided in SEQ ID NOs: 10-262, and
wherein the amino acid sequence of the recombinant Cas9 protein is not identical to the amino acid sequence of a naturally occurring Cas9 protein.

94-123. (canceled)

124. A recombinant Cas9 protein comprising an amino acid sequence that is at least 80% identical to the amino acid sequence of a Cas9 as provided by any one of SEQ ID NOs: 9-262,
wherein the amino acid sequence of the Cas9 protein comprises at least one mutation in an amino acid residue selected from the group consisting of amino acid residues 23, 108, 115, 141, 180, 230, 257, 262, 267, 284, 294, 324, 409, 455, 466, 474, 480, 543, 554, 654, 694, 711, 727, 763, 1063, 1100, 1219, 1244, 1256, 1289, and 1323 of the amino acid sequence provided in SEQ ID NO: 9, or in a corresponding amino acid residue in any of the amino acid sequences provided in SEQ ID NOs: 10-262, and
wherein the amino acid sequence of the recombinant Cas9 protein is not identical to the amino acid sequence of a naturally occurring Cas9 protein.

125. (canceled)

126. The Cas9 protein of claim 124, wherein the amino acid sequence of the Cas9 protein comprises at least one mutation selected from the group consisting of X23N, X108G, X115H, X141Q, X180N, X230S, X257N, X262T, X267G, X284N, X294R, X324L, X409I, X455F, X466A, X474I, X480K, X543D, X554R, X654L, X694I, X711E, X727P, X763I, X1063V, X1100I, X1219V, X1244N, X1256K, X1289Q, and X1323S of the amino acid sequence provided in SEQ ID NO: 9, or a corresponding mutation in any of the amino acid sequences provided in SEQ ID NOs: 10-262, wherein X represents any amino acid.

127. The Cas9 protein of any one of claim 124, wherein the amino acid sequence of the Cas9 protein comprises at least one mutation selected from the group consisting of D23N, E108G, R115H, K141Q, D180N, P230S, D257N, A262T, S267G, D284N, K294R, R324L, S409I, L455F, T466A, T474I, E480K, E543D, K554R, R654L, M694I, A711E, L727P, M763I, I1063V, V1100I, E1219V, K1244N, Q1256K, K1289Q, and A1323S of the amino acid sequence provided in SEQ ID NO: 9, or a corresponding mutation in any of the amino acid sequences provided in SEQ ID NOs: 10-262.

128-275. (canceled)

276. A recombinant Cas9 protein comprising an amino acid sequence that is at least 80% identical to the amino acid sequence of a Cas9 as provided by any one of SEQ ID NOs: 9-262,
wherein the amino acid sequence of the Cas9 protein comprises at least one mutation in an amino acid residue selected from the group consisting of amino acid residues 108, 217, 262, 324, 409, 480, 543, 673, 694, 1219, 1264, and 1365 of the amino acid sequence provided in SEQ ID NO: 9, or in a corresponding amino acid residue in any of the amino acid sequences provided in SEQ ID NOs: 10-262, and
wherein the amino acid sequence of the recombinant Cas9 protein is not identical to the amino acid sequence of a naturally occurring Cas9 protein.

277-345. (canceled)

346. A fusion protein comprising the Cas9 protein of claim 1, wherein the Cas9 protein or fragment is fused to an effector domain, thus forming a fusion protein.

347-352. (canceled)

353. The fusion protein of any one of claim 346, wherein the effector domain comprises an enzyme domain.

354. The fusion protein of any one of claim 346, wherein the effector domain comprises a nuclease domain, a nickase domain, a recombinase domain, a deaminase domain, a methyltransferase domain, a methylase domain, an acetylase domain, an acetyltransferase domain, a transcriptional activator domain, or a transcriptional repressor domain.

355-370. (canceled)

371. The fusion protein of claim 353, wherein the enzyme domain is a nuclease domain.

372. (canceled)

373. A dimer of the fusion protein of claim 371.

374-381. (canceled)

382. A fusion protein comprising the Cas9 protein of claim 124 fused to a second Cas9 protein.

383-390. (canceled)

391. A complex comprising the Cas9 protein of claim 124, and a guide RNA bound to the Cas9 protein or the Cas9 fusion protein.

392-398. (canceled)

399. A complex comprising the fusion protein of claim 382,
a first guide RNA bound to the Cas9 protein of the fusion protein, and
a second guide RNA bound to the second Cas9 protein of the fusion protein.

400-410. (canceled)

411. A method comprising contacting a DNA molecule:
(a) with the Cas9 protein of claim 93 and with a guide RNA, wherein the guide RNA is about 15-100 nucleotides long and comprises a sequence of at least 10 contiguous nucleotides that is complementary to a target sequence.

412-428. (canceled)

429. A polynucleotide encoding the Cas9 protein of claim 124.

430. A vector comprising a polynucleotide of claim 429.

431. (canceled)

432. A cell comprising the Cas9 protein of claim 124.

433. A mutated Cas9 protein that recognizes a non-canonical PAM sequence selected from the group consisting of AAA, AAC, AAG, AAT, CAA, CAC, CAG, CAT, GAA, GAC, GAG, GAT, TAA, TAC, TAG, TAT, ACA, ACC, ACG, ACT, CCA, CCC, CCG, CCT, GCA, GCC, GCG, GCT, TCA, TCC, TCG, TCT, AGA, AGC, AGT, CGA, CGC, CGT, GGA, GGC, GGT, TGA, TGC, TGT, ATA, ATC, ATG, ATT, CTA, CTC, CTG, CTT, GTA, GTC, GTG, GTT, TTA, TTC, TTG, and TTT.

434. (canceled)

The application's sequence listing, which the Patent Office published only in electronic form, follows.

SEQUENCE LISTING (5083 sequences)

SEQ ID NO: 1 - DNA, 4104 bp, Streptococcus pyogenes
atggataagaaatactcaataggcttagatatcggcacaaatagcgtcggatgggcggtgatcactgatgattataaggttccgtctaaaaagttcaaggttctgggaaatacagaccgccacagtatcaaaaaaaatcttataggggctcttttatttggcagtggagagacagcggaagcgactcgtctcaaacggacagctcgtagaaggtatacacgtcggaagaatcgtatttgttatctacaggagattttttcaaatgagatggcgaaagtagatgatagtttctttcatcgacttgaagagtcttttttggtggaagaagacaagaagcatgaacgtcatcctatttttggaaatatagtagatgaagttgcttatcatgagaaatatccaactatctatcatctgcgaaaaaaattggcagattctactgataaagcggatttgcgcttaatctatttggccttagcgcatatgattaagtttcgtggtcattttttgattgagggagatttaaatcctgataatagtgatgtggacaaactatttatccagttggtacaaatctacaatcaattatttgaagaaaaccctattaacgcaagtagagtagatgctaaagcgattctttctgcacgattgagtaaatcaagacgattagaaaatctcattgctcagctccccggtgagaagagaaatggcttgtttgggaatctcattgctttgtcattgggattgacccctaattttaaatcaaattttgatttggcagaagatgctaaattacagctttcaaaagatacttacgatgatgatttagataatttattggcgcaaattggagatcaatatgctgatttgtttttggcagctaagaatttatcagatgctattttactttcagatatcctaagagtaaatagtgaaataactaaggctcccctatcagcttcaatgattaagcgctacgatgaacatcatcaagacttgactcttttaaaagctttagttcgacaacaacttccagaaaagtataaagaaatcttttttgatcaatcaaaaaacggatatgcaggttatattgatgggggagctagccaagaagaattttataaatttatcaaaccaattttagaaaaaatggatggtactgaggaattattggtgaaactaaatcgtgaagatttgctgcgcaagcaacggacctttgacaacggctctattccccatcaaattcacttgggtgagctgcatgctattttgagaagacaagaagacttttatccatttttaaaagacaatcgtgagaagattgaaaaaatcttgacttttcgaattccttattatgttggtccattggcgcgtggcaatagtcgttttgcatggatgactcggaagtctgaagaaacaattaccccatggaattttgaagaagttgtcgataaaggtgcttcagctcaatcatttattgaacgcatgacaaactttgataaaaatcttccaaatgaaaaagtactaccaaaacatagtttgctttatgagtattttacggtttataacgaattgacaaaggtcaaatatgttactgagggaatgcgaaaaccagcatttctttcaggtgaacagaagaaagccattgttgatttactcttcaaaacaaatcgaaaagtaaccgttaagcaattaaaagaagattatttcaaaaaaatagaatgttttgatagtgttgaaatttcaggagttgaagatagatttaatgcttcattaggcgcctaccatgatttgctaaaaattattaaagataaagattttttggataatgaagaaaatgaagatatcttagaggatattgttttaacattgaccttatttgaagatagggggatgattgaggaaagacttaaaacatatgctcacctctttgatgataaggtgatgaaacagcttaaacgtcgccgttatactggttggggacgtttgtctcgaaaattgattaatggtattagggataagcaatctggcaaaacaatattagattttttgaaatcagatggttttgccaatcgcaattttatgcagctgatccatgatgatagtttgacatttaaagaagatattcaaaaagcacaggtgtctggacaaggccatagtttacatgaacagattgctaacttagctggcagtcctgctattaaaaaaggtattttacagactgtaaaaattgttgatgaactggtcaaagtaatggggcataagccagaaaatatcgttattgaaatggcacgtgaaaatcagacaactcaaaagggccagaaaaattcgcgagagcgtatgaaacgaatcgaagaaggtatcaaagaattaggaagtcagattcttaaagagcatcctgttgaaaatactcaattgcaaaatgaaaagctctatctctattatctacaaaatggaagagacatgtatgtggaccaagaattagatattaatcgtttaagtgattatgatgtcgatcacattgttccacaaagtttcattaaagacgattcaatagacaataaggtactaacgcgttctgataaaaatcgtggtaaatcggataacgttccaagtgaagaagtagtcaaaaagatgaaaaactattggagacaacttctaaacgccaagttaatcactcaacgtaagtttgataatttaacgaaagctgaacgtggaggtttgagtgaacttgataaagctggttttatcaaacgccaattggttgaaactcgccaaatcactaagcatgtggcacaaattttggatagtcgcatgaatactaaatacgatgaaaatgataaacttattcgagaggttaaagtgattaccttaaaatctaaattagtttctgacttccgaaaagatttccaattctataaagtacgtgagattaacaattaccatcatgcccatgatgcgtatctaaatgccgtcgttggaactgctttgattaagaaatatccaaaacttgaatcggagtttgtctatggtgattataaagtttatgatgttcgtaaaatgattgctaagtctgagcaagaaataggcaaagcaaccgcaaaatatttcttttactctaatatcatgaacttcttcaaaacagaaattacacttgcaaatggagagattcgcaaacgccctctaatcgaaactaatggggaaactggagaaattgtctgggataaagggcgagattttgccacagtgcgcaaagtattgtccatgccccaagtcaatattgtcaagaaaacagaagtacagacaggcggattctccaaggagtcaattttaccaaaaagaaattcggacaagcttattgctcgtaaaaaagactgggatccaaaaaaatatggtggttttgatagtccaacggtagcttattcagtcctagtggttgctaaggtggaaaaagggaaatcgaagaagttaaaatccgttaaagagttactagggatcacaattatggaaagaagttcctttgaaaaaaatccgattgactttttagaagctaaaggatataaggaagttaaaaaagacttaatcattaaactacctaaatatagtctttttgagttagaaaacggtcgtaaacggatgctggctagtgccggagaattacaaaaaggaaatgagctggctctgccaagcaaatatgtgaattttttatatttagctagtcattatgaaaagttgaagggtagtccagaagataacgaacaaaaacaattgtttgtggagcagcataagcattatttagatgagattattgagcaaatcagtgaattttctaagcgtgttattttagcagatgccaatttagataaagttcttagtgcatataacaaacatagagacaaaccaatacgtgaacaagcagaaaatattattcatttatttacgttgacgaatcttggagctcccgctgcttttaaatattttgatacaacaattgatcgtaaacgatatacgtctacaaaagaagttttagatgccactcttatccatcaatccatcactggtctttatgaaacacgcattgatttgagtcagctaggaggtgactga

SEQ ID NO: 2 - protein, 1367 aa, Streptococcus pyogenes
MDKKYSIGLDIGTNSVGWAVITDDYKVPSKKFKVLGNTDRHSIKKNLIGALLFGSGETAEATRLKRTARRRYTRRKNRICYLQEIFSNEMAKVDDSFFHRLEESFLVEEDKKHERHPIFGNIVDEVAYHEKYPTIYHLRKKLADSTDKADLRLIYLALAHMIKFRGHFLIEGDLNPDNSDVDKLFIQLVQIYNQLFEENPINASRVDAKAILSARLSKSRRLENLIAQLPGEKRNGLFGNLIALSLGLTPNFKSNFDLAEDAKLQLSKDTYDDDLDNLLAQIGDQYADLFLAAKNLSDAILLSDILRVNSEITKAPLSASMIKRYDEHHQDLTLLKALVRQQLPEKYKEIFFDQSKNGYAGYIDGGASQEEFYKFIKPILEKMDGTEELLVKLNREDLLRKQRTFDNGSIPHQIHLGELHAILRRQEDFYPFLKDNREKIEKILTFRIPYYVGPLARGNSRFAWMTRKSEETITPWNFEEVVDKGASAQSFIERMTNFDKNLPNEKVLPKHSLLYEYFTVYNELTKVKYVTEGMRKPAFLSGEQKKAIVDLLFKTNRKVTVKQLKEDYFKKIECFDSVEISGVEDRFNASLGAYHDLLKIIKDKDFLDNEENEDILEDIVLTLTLFEDRGMIEERLKTYAHLFDDKVMKQLKRRRYTGWGRLSRKLINGIRDKQSGKTILDFLKSDGFANRNFMQLIHDDSLTFKEDIQKAQVSGQGHSLHEQIANLAGSPAIKKGILQTVKIVDELVKVMGHKPENIVIEMARENQTTQKGQKNSRERMKRIEEGIKELGSQILKEHPVENTQLQNEKLYLYYLQNGRDMYVDQELDINRLSDYDVDHIVPQSFIKDDSIDNKVLTRSDKNRGKSDNVPSEEVVKKMKNYWRQLLNAKLITQRKFDNLTKAERGGLSELDKAGFIKRQLVETRQITKHVAQILDSRMNTKYDENDKLIREVKVITLKSKLVSDFRKDFQFYKVREINNYHHAHDAYLNAVVGTALIKKYPKLESEFVYGDYKVYDVRKMIAKSEQEIGKATAKYFFYSNIMNFFKTEITLANGEIRKRPLIETNGETGEIVWDKGRDFATVRKVLSMPQVNIVKKTEVQTGGFSKESILPKRNSDKLIARKKDWDPKKYGGFDSPTVAYSVLVVAKVEKGKSKKLKSVKELLGITIMERSSFEKNPIDFLEAKGYKEVKKDLIIKLPKYSLFELENGRKRMLASAGELQKGNELALPSKYVNFLYLASHYEKLKGSPEDNEQKQLFVEQHKHYLDEIIEQISEFSKRVILADANLDKVLSAYNKHRDKPIREQAENIIHLFTLTNLGAPAAFKYFDTTIDRKRYTSTKEVLDATLIHQSITGLYETRIDLSQLGGD

SEQ ID NO: 3 - DNA, 4212 bp, Artificial Sequence
  Synthetic polynucleotide
atggataaaaagtattctattggtttagacatcggcactaattccgttggatgggctgtcataaccgatgaatacaaagtaccttcaaagaaatttaaggtgttggggaacacagaccgtcattcgattaaaaagaatcttatcggtgccctcctattcgatagtggcgaaacggcagaggcgactcgcctgaaacgaaccgctcggagaaggtatacacgtcgcaagaaccgaatatgttacttacaagaaatttttagcaatgagatggccaaagttgacgattctttctttcaccgtttggaagagtccttccttgtcgaagaggacaagaaacatgaacggcaccccatctttggaaacatagtagatgaggtggcatatcatgaaaagtacccaacgatttatcacctcagaaaaaagctagttgactcaactgataaagcggacctgaggttaatctacttggctcttgcccatatgataaagttccgtgggcactttctcattgagggtgatctaaatccggacaactcggatgtcgacaaactgttcatccagttagtacaaacctataatcagttgtttgaagagaaccctataaatgcaagtggcgtggatgcgaaggctattcttagcgcccgcctctctaaatcccgacggctagaaaacctgatcgcacaattacccggagagaagaaaaatgggttgttcggtaaccttatagcgctctcactaggcctgacaccaaattttaagtcgaacttcgacttagctgaagatgccaaattgcagcttagtaaggacacgtacgatgacgatctcgacaatctactggcacaaattggagatcagtatgcggacttatttttggctgccaaaaaccttagcgatgcaatcctcctatctgacatactgagagttaatactgagattaccaaggcgccgttatccgcttcaatgatcaaaaggtacgatgaacatcaccaagacttgacacttctcaaggccctagtccgtcagcaactgcctgagaaatataaggaaatattctttgatcagtcgaaaaacgggtacgcaggttatattgacggcggagcgagtcaagaggaattctacaagtttatcaaacccatattagagaagatggatgggacggaagagttgcttgtaaaactcaatcgcgaagatctactgcgaaagcagcggactttcgacaacggtagcattccacatcaaatccacttaggcgaattgcatgctatacttagaaggcaggaggatttttatccgttcctcaaagacaatcgtgaaaagattgagaaaatcctaacctttcgcataccttactatgtgggacccctggcccgagggaactctcggttcgcatggatgacaagaaagtccgaagaaacgattactccatggaattttgaggaagttgtcgataaaggtgcgtcagctcaatcgttcatcgagaggatgaccaactttgacaagaatttaccgaacgaaaaagtattgcctaagcacagtttactttacgagtatttcacagtgtacaatgaactcacgaaagttaagtatgtcactgagggcatgcgtaaacccgcctttctaagcggagaacagaagaaagcaatagtagatctgttattcaagaccaaccgcaaagtgacagttaagcaattgaaagaggactactttaagaaaattgaatgcttcgattctgtcgagatctccggggtagaagatcgatttaatgcgtcacttggtacgtatcatgacctcctaaagataattaaagataaggacttcctggataacgaagagaatgaagatatcttagaagatatagtgttgactcttaccctctttgaagatcgggaaatgattgaggaaagactaaaaacatacgctcacctgttcgacgataaggttatgaaacagttaaagaggcgtcgctatacgggctggggacgattgtcgcggaaacttatcaacgggataagagacaagcaaagtggtaaaactattctcgattttctaaagagcgacggcttcgccaataggaactttatgcagctgatccatgatgactctttaaccttcaaagaggatatacaaaaggcacaggtttccggacaaggggactcattgcacgaacatattgcgaatcttgctggttcgccagccatcaaaaagggcatactccagacagtcaaagtagtggatgagctagttaaggtcatgggacgtcacaaaccggaaaacattgtaatcgagatggcacgcgaaaatcaaacgactcagaaggggcaaaaaaacagtcgagagcggatgaagagaatagaagagggtattaaagaactgggcagccagatcttaaaggagcatcctgtggaaaatacccaattgcagaacgagaaactttacctctattacctacaaaatggaagggacatgtatgttgatcaggaactggacataaaccgtttatctgattacgacgtcgatcacattgtaccccaatcctttttgaaggacgattcaatcgacaataaagtgcttacacgctcggataagaaccgagggaaaagtgacaatgttccaagcgaggaagtcgtaaagaaaatgaagaactattggcggcagctcctaaatgcgaaactgataacgcaaagaaagttcgataacttaactaaagctgagaggggtggcttgtctgaacttgacaaggccggatttattaaacgtcagctcgtggaaacccgccaaatcacaaagcatgttgcacagatactagattcccgaatgaatacgaaatacgacgagaacgataagctgattcgggaagtcaaagtaatcactttaaagtcaaaattggtgtcggacttcagaaaggattttcaattctataaagttagggagataaataactaccaccatgcgcacgacgcttatcttaatgccgtcgtagggaccgcactcattaagaaatacccgaagctagaaagtgagtttgtgtatggtgattacaaagtttatgacgtccgtaagatgatcgcgaaaagcgaacaggagataggcaaggctacagccaaatacttcttttattctaacattatgaatttctttaagacggaaatcactctggcaaacggagagatacgcaaacgacctttaattgaaaccaatggggagacaggtgaaatcgtatgggataagggccgggacttcgcgacggtgagaaaagttttgtccatgccccaagtcaacatagtaaagaaaactgaggtgcagaccggagggttttcaaaggaatcgattcttccaaaaaggaatagtgataagctcatcgctcgtaaaaaggactgggacccgaaaaagtacggtggcttcgatagccctacagttgcctattctgtcctagtagtggcaaaagttgagaagggaaaatccaagaaactgaagtcagtcaaagaattattggggataacgattatggagcgctcgtcttttgaaaagaaccccatcgacttccttgaggcgaaaggttacaaggaagtaaaaaaggatctcataattaaactaccaaagtatagtctgtttgagttagaaaatggccgaaaacggatgttggctagcgccggagagcttcaaaaggggaacgaactcgcactaccgtctaaatacgtgaatttcctgtatttagcgtcccattacgagaagttgaaaggttcacctgaagataacgaacagaagcaactttttgttgagcagcacaaacattatctcgacgaaatcatagagcaaatttcggaattcagtaagagagtcatcctagctgatgccaatctggacaaagtattaagcgcatacaacaagcacagggataaacccatacgtgagcaggcggaaaatattatccatttgtttactcttaccaacctcggcgctccagccgcattcaagtattttgacacaacgatagatcgcaaacgatacacttctaccaaggaggtgctagacgcgacactgattcaccaatccatcacgggattatatgaaactcggatagatttgtcacagcttgggggtgacggatcccccaagaagaagaggaaagtctcgagcgactacaaagaccatgacggtgattataaagatcatgacatcgattacaaggatgacgatgacaaggctgcagga

SEQ ID NO: 4 - protein, 1368 aa, Artificial Sequence
  Synthetic polypeptide
MDKKYSIGLAIGTNSVGWAVITDEYKVPSKKFKVLGNTDRHSIKKNLIGALLFDSGETAEATRLKRTARRRYTRRKNRICYLQEIFSNEMAKVDDSFFHRLEESFLVEEDKKHERHPIFGNIVDEVAYHEKYPTIYHLRKKLVDSTDKADLRLIYLALAHMIKFRGHFLIEGDLNPDNSDVDKLFIQLVQTYNQLFEENPINASGVDAKAILSARLSKSRRLENLIAQLPGEKKNGLFGNLIALSLGLTPNFKSNFDLAEDAKLQLSKDTYDDDLDNLLAQIGDQYADLFLAAKNLSDAILLSDILRVNTEITKAPLSASMIKRYDEHHQDLTLLKALVRQQLPEKYKEIFFDQSKNGYAGYIDGGASQEEFYKFIKPILEKMDGTEELLVKLNREDLLRKQRTFDNGSIPHQIHLGELHAILRRQEDFYPFLKDNREKIEKILTFRIPYYVGPLARGNSRFAWMTRKSEETITPWNFEEVVDKGASAQSFIERMTNFDKNLPNEKVLPKHSLLYEYFTVYNELTKVKYVTEGMRKPAFLSGEQKKAIVDLLFKTNRKVTVKQLKEDYFKKIECFDSVEISGVEDRFNASLGTYHDLLKIIKDKDFLDNEENEDILEDIVLTLTLFEDREMIEERLKTYAHLFDDKVMKQLKRRRYTGWGRLSRKLINGIRDKQSGKTILDFLKSDGFANRNFMQLIHDDSLTFKEDIQKAQVSGQGDSLHEHIANLAGSPAIKKGILQTVKVVDELVKVMGRHKPENIVIEMARENQTTQKGQKNSRERMKRIEEGIKELGSQILKEHPVENTQLQNEKLYLYYLQNGRDMYVDQELDINRLSDYDVDHIVPQSFLKDDSIDNKVLTRSDKNRGKSDNVPSEEVVKKMKNYWRQLLNAKLITQRKFDNLTKAERGGLSELDKAGFIKRQLVETRQITKHVAQILDSRMNTKYDENDKLIREVKVITLKSKLVSDFRKDFQFYKVREINNYHHAHDAYLNAVVGTALIKKYPKLESEFVYGDYKVYDVRKMIAKSEQEIGKATAKYFFYSNIMNFFKTEITLANGEIRKRPLIETNGETGEIVWDKGRDFATVRKVLSMPQVNIVKKTEVQTGGFSKESILPKRNSDKLIARKKDWDPKKYGGFDSPTVAYSVLVVAKVEKGKSKKLKSVKELLGITIMERSSFEKNPIDFLEAKGYKEVKKDLIIKLPKYSLFELENGRKRMLASAGELQKGNELALPSKYVNFLYLASHYEKLKGSPEDNEQKQLFVEQHKHYLDEIIEQISEFSKRVILADANLDKVLSAYNKHRDKPIREQAENIIHLFTLTNLGAPAAFKYFDTTIDRKRYTSTKEVLDATLIHQSITGLYETRIDLSQLGGD

SEQ ID NO: 5 - protein, 5 aa, Artificial Sequence
  Synthetic polypeptide
GGGGS

SEQ ID NO: 6 - protein, 5 aa, Artificial Sequence
  Synthetic polypeptide
EAAAK

SEQ ID NO: 7 - protein, 16 aa, Artificial Sequence
  Synthetic polypeptide
SGSETPGTSESATPES

SEQ ID NO: 8 - protein, 1368 aa, Artificial Sequence
  Synthetic polypeptide
MDKKYSIGLAIGTNSVGWAVITDEYKVPSKKFKVLGNTDRHSIKKNLIGALLFDSGETAEATRLKRTARRRYTRRKNRICYLQEIFSNEMAKVDDSFFHRLEESFLVEEDKKHERHPIFGNIVDEVAYHEKYPTIYHLRKKLVDSTDKADLRLIYLALAHMIKFRGHFLIEGDLNPDNSDVDKLFIQLVQTYNQLFEENPINASGVDAKAILSARLSKSRRLENLIAQLPGEKKNGLFGNLIALSLGLTPNFKSNFDLAEDAKLQLSKDTYDDDLDNLLAQIGDQYADLFLAAKNLSDAILLSDILRVNTEITKAPLSASMIKRYDEHHQDLTLLKALVRQQLPEKYKEIFFDQSKNGYAGYIDGGASQEEFYKFIKPILEKMDGTEELLVKLNREDLLRKQRTFDNGSIPHQIHLGELHAILRRQEDFYPFLKDNREKIEKILTFRIPYYVGPLARGNSRFAWMTRKSEETITPWNFEEVVDKGASAQSFIERMTNFDKNLPNEKVLPKHSLLYEYFTVYNELTKVKYVTEGMRKPAFLSGEQKKAIVDLLFKTNRKVTVKQLKEDYFKKIECFDSVEISGVEDRFNASLGTYHDLLKIIKDKDFLDNEENEDILEDIVLTLTLFEDREMIEERLKTYAHLFDDKVMKQLKRRRYTGWGRLSRKLINGIRDKQSGKTILDFLKSDGFANRNFMQLIHDDSLTFKEDIQKAQVSGQGDSLHEHIANLAGSPAIKKGILQTVKVVDELVKVMGRHKPENIVIEMARENQTTQKGQKNSRERMKRIEEGIKELGSQILKEHPVENTQLQNEKLYLYYLQNGRDMYVDQELDINRLSDYDVDAIVPQSFLKDDSIDNKVLTRSDKNRGKSDNVPSEEVVKKMKNYWRQLLNAKLITQRKFDNLTKAERGGLSELDKAGFIKRQLVETRQITKHVAQILDSRMNTKYDENDKLIREVKVITLKSKLVSDFRKDFQFYKVREINNYHHAHDAYLNAVVGTALIKKYPKLESEFVYGDYKVYDVRKMIAKSEQEIGKATAKYFFYSNIMNFFKTEITLANGEIRKRPLIETNGETGEIVWDKGRDFATVRKVLSMPQVNIVKKTEVQTGGFSKESILPKRNSDKLIARKKDWDPKKYGGFDSPTVAYSVLVVAKVEKGKSKKLKSVKELLGITIMERSSFEKNPIDFLEAKGYKEVKKDLIIKLPKYSLFELENGRKRMLASAGELQKGNELALPSKYVNFLYLASHYEKLKGSPEDNEQKQLFVEQHKHYLDEIIEQISEFSKRVILADANLDKVLSAYNKHRDKPIREQAENIIHLFTLTNLGAPAAFKYFDTTIDRKRYTSTKEVLDATLIHQSITGLYETRIDLSQLGGD

SEQ ID NO: 9 - protein, 1368 aa, Streptococcus pyogenes [sequence omitted]

SEQ ID NO: 10 - protein, 1359 aa, Streptococcus pyogenes
MDKKYSIGLDIGTNSVGWAVITDEYKVPSKKFKVLGNTDRHSIKKNLIGALLFDSGETAEATRLKRTARRRYTRRKNRICYLQEIFSNEMAKVDDSFFHRLEESFLVEEDKKHERHPIFGNIVDEVAYHEKYPTIYHLRKKLVDSTDKADLRLIYLALAHMIKFRGHFLIEGDLNPDNSDVDKLFIQLVQTYNQLFEENINASGVDAKAILSARLSKSRRLENLIAQLPGEKKNGLFGNLIALSLGLTPNFKSNFDLAEDAKLQLSKDTYDDDLDNLLAQIGDQYADLFLAAKNLSDAILLSDILRVNTEITKAPLSASMIKRYDEHHQDLTLLKALVRQQLPEKYKEIFFDQSKNGYAGYIDGGASQEEFYKFIKPILEKMDGTEELLVKLNREDLLRKQRTFDNGSIPHQIHLGELHAILRRQEDFYPFLKDNREKIEKILTFRIPYYVGPLARGNSRFAWMTRKSEETITPWNFEEVVDKGASAQSFIERMTNFDKNLPNEKVLPKHSLLYEYFTVYNELTKVKYVTEGMRKPAFLSGEQKKAIVDLLFKTNRKVTVKQLKEDYFKKIECFDSVEISGVEDRFNASLGTYHDLLKIIKDKDFLDNEENEDILEDIVLTLTLFEDREMIEERLKTYAHLFDDKVMKQLKRRRYTGWGRLSRKLINGIRDKQSGKTILDFLKDGFANRNFMQLIHDDSLTFKEDIQKAQVSGQGDSLHEHIANLAGSPAIKKGILQTVKVVDELVKVMGRHKPENIVIEMARENQTTQKGQKNSRERMKRIEEGIKELGSQILKEHPVENTQLQNEKLYLYYLQNGRDMYVDQELDINRLSDYDVDHIVPQSFLKDDSIDNKVLTRSDKNRGKSDNVPSEEVVKKMKNYWRQLLNAKLITQRKFDNLTKAERGGLSELDKAGFIKRQLVETRQITKHVAQILDSRMNTKYDENDKLIREVKVITLKSKLVSDFRKDFQFYKVREINNYHHAHDAYLNAVVGTALIKKYPKLESEFVYGDYKVYDVSEQEIGKATAKYFFYSNIMNFFKTEITLANGEIRKRPLIETNGETGEIVWDKGRDFATVRKVLSMPQVNIVKKTEVQTGGFSKESILPKRNSDKLIARKKDWDPKKYGGFDSPTVAYSVLVVAKVEKGKSKKLKSVKELLGITIMERSSFEKNPIDFLEAKGYKEVKKDLIIKLPKYSLFELENGRKRMLASGELQKGNELALPSKYVNFLYLASHYEKLKGSPEDNEQKQLFVEQHKHYLDEIIEQISEFSKRVILADANLDKVLSAYNKHRDKPIREQAENIIHLFTLTNLGAPAAFKYFDTTIDRKRYTSTKEVLDATLIHQSITGLYETRIDLSQLGGD

SEQ ID NO: 11 - protein, 1355 aa, Streptococcus gallolyticus
MTKKNYSIGLDIGTNSVGWAVITDDYKVPAKKMKVLGNTDKKYIKKNLLGALLFDSGETAEATRLKRTARRRYTRRKNRLRYLQEIFANEIAKVDESFFQRLDESFLTDDDKTFDSHPIFGNKAEEDAYHQKFPTIYHLRKHLADSSEKADLRLVYLALAHMIKFRGHFLIEGELNAENTDVQKIFADFVGVYNRTFDDSHLSEITVDVASILTEKISKSRRLENLIKYYPTEKKNTLFGNLIALALGLQPNFKTNFKLSEDAKLQFSKDTYEEDLEELLGKIGDDYADLFTSAKNLYDAILLSGILTVDDNSTKAPLSASMIKRYVEHHEDLEKLKEFIKANKSELYHDIFKDKNKNGYAGYIENGVKQDEFYKYLKNILSKIKIDGSDYFLDKIEREDFLRKQRTFDNGSIPHQIHLQEMHAILRRQGDYYPFLKEKQDRIEKILTFRIPYYVGPLVRKDSRFAWAEYRSDEKITPWNFDKVIDKEKSAEKFITRMTLNDLYLPEEKVLPKHSHVYETYAVYNELTKIKYVNEQGKESFFDSNMKQEIFDHVFKENRKVTKEKLLNYLNKEFPEYRIKDLIGLDKENKSFNASLGTYHDLKKILDKAFLDDKVNEEVIEDIIKTLTLFEDKDMIHERLQKYSDIFTANQLKKLERRHYTGWGRLSYKLINGIRNKENNKTILDYLIDDGSANRNFMQLINDDTLPFKQIIQKSQVVGDVDDIEAVVHDLPGSPAIKKGILQSVKIVDELVKVMGGNPDNIVIEMARENQTTNRGRSQSQQRLKKLQNSLKPSYIEDKVENSHLQNDQLFLYYIQNGKDMYTGDELDIDHLSDYDIDHIIPQAFIKDDSIDNRVLTSSAKNRGKSDDVPSLDIVRARKAEWVRLYKSGLISKRKFDNLTKAERGGLTEADKAGFIKRQLVETRQITKHVAQILDARFNTEHDENDKVIRDVKVITLKSNLVSQFRKDFEFYKVREINDYHHAHDAYLNAVVGTALLKKYPKLASEFVYGEYKKYDISSDKATAKYFFYSNLMNFFKTKVKYADGTVFERPIIETNADGEIAWNKQIDFEKVRKVLSYPQVNIVKKVETQTGGFSKESILPKGDSDKLIPRKTKKVYWDTKKYGGFDSPTVAYSVFVVADVEKGKAKKLKTVKELVGISIMERSFFEENPVEFLENKGYHNIREDKLIKLPKYSLFEFEGGRRRLLASASELQKGNEMVLPGYLVELLYHAHRADNFNSTEYLNYVSEHKKEFEKVLSCVEDFANLYVDVEKNLSKIRAVADSMDNFSIEEISNSFINLLTLTALGAPADFNFLGEKIPRKRYTSTKECLNATLIHQSITGLYETRIDLSKLGEE

SEQ ID NO: 12 - protein, 1359 aa, Streptococcus mitis
KKGYSIGLDIGTNSVGFAVITDDYKVPSKKMKVLGNTDKRFIKKNLIGALLFDEGTTAEARRLKRTARRRYTRRKNRLRYLQEIFSEEMSKVDSSFFHRLDDSFLIPEDKRESKYPIFATLTEEKEYHKQFPTIYHLRKQLADSKEKTDLRLIYLALAHMIKYRGHFLYEEAFDIKNNDIQKIFNEFISIYDNTFEGSSLSGQNAQVEAIFTDKISKSAKRERVLKLFPDEKSTGLFSEFLKLIVGNQADFKKHFDLEDKAPLQFSKDTYDEDLENLLGQIGDDFTDLFVSAKKLYDAILLSGILTVTDPSTKAPLSASMIERYENHQNDLAALKQFIKNNLPEKYDEVFSDQSKDGYAGYIDGKTTQETFYKYIKNLLSKFEGTDYFLDKIEREDFLRKQRTFDNGSIPHQIHLQEMNAILRRQGEYYPFLKDNKEKIEKILTFRIPYYVGPLARGNRDFAWLTRNSDEAIRPWNFEEIVDKASSAEDFINKMTNYDLYLPEEKVLPKHSLLYETFAVYNELTKVKFIAEGLRDYQFLDSGQKKQIVNQLFKENRKVTEKDIIHYLHNVDGYDGIELKGIEKQFNASLSTYHDLLKIIKDKEFMDDAKNEAILENIVHTLTIFEDREMIKQRLAQYDSLFDEKVIKALTRRHYTGWGKLSAKLINGICDKQTGNTILDYLIDDGKINRNFMQLINDDGLSFKEIIQKAQVIGKTDDVKQVVQELSGSPAIKKGILQSIKIVDELVKVMGHAPESIVIEMARENQTTARGKKNSQQRYKRIEDSLKILASNILKENPTDNNQLQNDRLFLYYLQNGKDMYTGEALDINQLSSYDIDHIIPQAFIKDDSLDNRVLTSSKDNRGKSDNVPSIEVVQKRKAFWQQLLDSKLISERKFNNLTKAERGGLDERDKVGFIKRQLVETRQITKHVAQILDARYNTEVNEKDKKNRTVKIITLKSNLVSNFRKEFRLYKVREINDYHHAHDAYLNAVVAKAILKKYPKLEPEFVYGEYQKYDLSKDPKEVEKATEKYFFYSNLLNFFKEEVHYADGTIVKRENIEYSKDTGEIAWNKEKDFAIIKKVLSLPQVNIVKKREVQTGGFSKESILPKGNSDKLIPRKTKDILLDTTKYGGFDSPVIAYSILLIADIEKGKAKKLKTVKTLVGITIMEKAAFEENPITFLENKGYHNVRKENILCLPKYSLFELENGRRRLLASAKELQKGNEIVLPVYLTTLLYHSKNVHKLDEPGHLEYIQKHRNEFKDLLNLVSEFSQKYVLADANLEKIKSLYADNEQADIEILANSFINLLTFTALGAPAAFKFFGKDIDRKRYTTVSEILNATLIHQSITGLYETWIDLSKLGED

SEQ ID NO: 13 - protein, 986 aa, Staphylococcus aureus
MKRNYILGLDIGITSVGYGIIDYETRDVIDAGVRLFKEANVENNEGRRSKRGARRLKRRRRHRIQRVKKLLFDYNLLTDHSELSGNPYEARVKGLSQKLSEEEFSAALLHLAKRRGVHNVNEVEEDTGNELSTKEQISRNSKLEEKYVAELQLERLKKDGEVRGSINRKTSDYVKEAKQLLKVQKAYHQLDQSFIDTYIDLLETRRTYYEGPGEGSPFGWKDIKEWYEMLMGHCTYFPEELRSVKYAYNADLYNALNDLNNLVITRDENEKLEYYEKFQIIENVFKQKKKPTLKQIAKEILVNEEDIKGYRVTSTGKPEFTNLKVYHDIKDITARKENAELLDQIAKILTIYQSSEDIQEELTNLNSELTQEEIEQISNLKGYTGTHNLSLKAINLILDELWTNDNQIAIFNRLKLVPKKVDLSQQKEIPTTLVDDFILSPVVKRSFIQSIKVINAIIKKYGLPNDIIIELAREKNSKDAQKMINEMQKQTNEEIIRTTGKENAKYLIEKIKLHDMQEGKCLYSLEAIPLEDLLNNPFNYEVDHIIPRSVSFDNSFNNKVLVKQEEASKKGNRTPFQYLSSSDSKISYETFKKHILNLAKGKGRISKTKKEYLLEERDQKDFINRNLVDTRYATRGLMNLLRSYFRVNNLDVKVKSINGGFTSFLRRKWKFKKERNKGYKHHAEDALIIANADFIFKEWKKLDKNQMFEEKETEQEYKEIFITPHQIKHIKDFKDYKYSHRVDKKPNREVNNLNGLYDKDNDKLKKLINKSPEKLLMYHHDPQTYQKKLIMEQYGDEKNLYKYYEETGNYLTKYSKKDNGPVIKKIKYYGNKLNAHLDITDDYPNSVKLSLKPYRFDVYLDNGVYKFVTVKNLDVIKKENYYEVNSKAYEEAKKKKISNQAEFIASFYNNDLIKINGELYRVIGVNNDLLNRIEVNMIDITYREYLENMNDKRPPRIIKTIASKTQSIKKLYEVKSKKHPQIIKKG

SEQ ID NO: 14 - protein, 1044 aa, Streptococcus pyogenes
LSASMIKRYDEHHQDLTLLKALVRQQLPEKYKEIFFDQSKNGYAGYIDGGASQEEFYKFIKPILEKMDGTEELLAKLNREDLLRKQRTFDNGSIPHQIHLGELHAILRRQEDFYPFLKDNREKIEKILTFRIPYYVGPLARGNSRFAWMTRKSEETITPWNFEEVVDKGASAQSFIERMTNFDKNLPNEKVLPKHSLLYEYFTVYNELTKVKYVTEGMRKPAFLSGEQKKAIVDLLFKTNRKVTVKQLKEDYFKKIECFDSVEISGVEDRFNASLGTYHDLLKIIKDKDFLDNEENEDILEDIVLTLTLFEDREMIEERLKTYAHLFDDKVMKQLKRRRYTGWGRLSRKLINGIRDKQSGKTILDFLKDGFANRNFMQLIHDDSLTFKEDLQKAQVSGQGDSLHEHIANLAGSPAIKKGILQTVKVVDELVKVMGRHKPENIVIEMARENQTTQKGQKNSRERMKRIEEGIKELGSDILKEYPVENTQLQNEKLYLYYLQNGRDMYVDQELDINRLSDYDVDHIVPQSFLKDDSIDNKVLTRSDKNRGKSDNVPSEEVVKKMKNYWKQLLNAKLITQRKFDNLTKAERGGLSELDKAGFIKRQLVETRQITKHVAQILDSRMNTKYDENDKLIREVRVITLKSKLVSDFRKDFQFYKVREINNYHHAHDAYLNAVVGTALIKKYPKLESEFVYGDYKVYDISEQEIGKATAKYFFYSNIMNFFKTEITLANGEIRKRPLIETNGETGEIVWDKGRDFATVRKVLSMPQVNIVKKTEVQTGGFSKESILPKRNSDKLIARKKDWDPKKYGGFDSPTVAYSVLVVAKVEKGKSKKLKSVKELVGITIMERSSFEKDPVDFLEAKGYKEVRKDLIIKLPKYSLFELENGRKRMLASGELQKGNELALPSKYVNFLYLASHYEKLKGSPEDNEQKQLFVEQHKHYLDEIIEQISEFSKRVILADANLDKVLSAYNKHRDKPIREQAENIIHLFTLTNLGAPAAFKCFDTTIGRNRYKSIKEVLDATLIHQSITGLYETRIDLSQLGGD

SEQ ID NO: 15 - protein, 1359 aa, Streptococcus pyogenes; identical to SEQ ID NO: 10

SEQ ID NO: 16 - protein, 1359 aa, Streptococcus pyogenes
MDKKYSIGLDIGTNSVGWAVITDDYKVPSKKLKGLGNTDRHGIKKNLIGALLFDSGETAEATRLKRTARRRYTRRKNRICYLQEIFSNEMAKVDDSFFHRLEESFLVEEDKKHERHPIFGNIVDEVAYHEKYPTIYHLRKKLADSTDKVDLRLIYLALAHMIKFRGHFLIEGDLNPDNSDVDKLFIQLVQTYNQLFEENINASRVDAKAILSARLSKSRRLENLIAQLPGEKKNGLFGNLIALSLGLTPNFKSNFDLAEDAKLQLSKDTYDDDLDNLLAQIGDQYADLFLAAKNLSDATLLSDILRVNSEITKAPLSASMIKRYDEHHQDLTLLKALVRQQLPEKYKEIFFDQSKNGYAGYIDGGASQEEFYKFIKPILEKMDGTEELLAKLNREDLLRKQRTFDNGSIPYQIHLGELHAILRRQEDFYPFLKDNREKIEKILTFRIPYYVGPLARGNSRFAWMTRKSEETITPWNFEEVVDKGASAQSFIERMTNFDKNLPNEKVLPKHSLLYEYFTVYNELTKVKYVTEGMRKPAFLSGEQKKAIVDLLFKTNRKVTVKQLKEDYFKKIECFDSVEISGVEDRFNASLGTYHDLLKIIKDKDFLDNEENEDILEDIVLTLTLFEDREMIEERLKTYAHLFDDKVMKQLKRRRYTGWGRLSRKLINGIRDKQSGKTILDFLKDGFANRNFMQLIHDDSLTFKEDIQKAQVSGQGDSLHEHIANLAGSPAIKKGILQTVKVVDELVKVMGRHKPENIVIEMARENQTTQKGQKNSRERMKRIEEGIKELGSDILKEYPVENTQLQNEKLYLYYLQNGRDMYVDQELDINRLSDYDVDHIVPQSFLKDDSIDNKVLTRSDKNRGKSDNVPSEEVVKKMKNYWRQLLNAKLITQRKFDNLTKAERGGLSELDKVGFIKRQLVETRQITKHVAQILDSRMNTKYDENDKLIREVRVITLKSKLVSDFRKDFQFYKVREINNYHHAHDAYLNAVVGTALIKKYPKLESEFVYGDYKVYDVSEQEIGKATAKYFFYSNIMNFFKTEITLANGEIRKRPLIETNGETGEIVWDKGRDFATVRKVLSMPQVNIVKKTEVQTGGFSKESILPKRNSDKLIARKKDWDPKKYGGFDSPTVAYSVLVVAKVEKGKSKKLKSVKELLGITIMERSSFEKDPIDFLEAKGYKEVRKDLIIKLPKYSLFELENGRKRMLASGELQKGNELALPSKYVNFLYLASHYEKLKGSPEDNEQKQLFVEQHKHYLDEIIEQISEFSKRVILADANLDKVLSAYNKHRDKPIREQAENIIHLFTLTNLGAPAAFKYFDTTIDRKRYTSTKEVLDATLIHQSITGLYETRIDLSQLGGD

SEQ ID NO: 17 - protein, 1359 aa, Streptococcus pyogenes
MDKKYSIGLDIGTNSVGWAVITDDYKVPSKKFKVLGNTDRHSIKKNLIGALLFDSGETAEATRLKRTARRRYTRRKNRICYLQEIFSNEMAKVDDSFFHRLEESFLVEEDKKHERHPIFGNIVDEVAYHEKYPTIYHLRKKLVDSTDKADLRLIYLALAHMIKFRGHFLIEGDLNPDNSDVDKLFIQLVQTYNQLFEENINASGVDAKAILSARLSKSRRLENLIAQLPGEKKNGLFGNLIALSLGLTPNFKSNFDLAEDAKLQLSKDTYDDDLDNLLAQIGDQYADLFLAAKNLSDAILLSDILRLNSEITKAPLSASMIKRYDEHHQDLTLLKALVRQQLPEKYKEIFFDQSKNGYAGYIDGGASQEEFYKFIKPILEKMDGTEELLAKLNREDLLRKQRTFDNGSIPHQIHLGELHAILRRQEDFYPFLKDNREKIEKILTFRIPYYVGPLARGNSRFAWMTRKSEETITPWNFEEVVDKGASAQSFIERMTNFDKNLPNEKVLPKHSLLYEYFTVYNELTKVKYVTEGMRKPAFLSGEQKKAIVDLLFKTNRKVTVKQLKEDYFKKIECFDSVEISGVEDRFNASLGTYHDLLKIIKDKDFLDNEENEDILEDIVLTLTLFEDREMIEERLKTYAHLFDDKVMKQLKRRRYTGWGRLSRKLINGIRDKQSGKTILDFLKDGFANRNFMQLIHDDSLTFKEDIQKAQVSGQGDSLHEHIANLAGSPAIKKGILQTVKVVDELVKVMGRHKPENIVIEMARENQTTQKGQKNSRERMKRIEEGIKELGSQILKEHPVENTQLQNEKLYLYYLQNGRDMYVDQELDINRLSDYDVDHIVPQSFIKDDSIDNKVLTRSDKNRGKSNNVPSEEVVKKMKNYWRQLLNAKLITQRKFDNLTKAERGGLSELDKAGFIKRQLVETRQITKHVAQILDSRMNTKYDENDKLIREVKVITLKSKLVSDFRKDFQFYKVREINNYHHAHDAYLNAVVGTALIKKYPKLESEFVYGDYKVYDVSEQEIGKATAKYFFYSNIMNFFKTEITLANGEIRKRPLIETNGETGEIVWDKGRDFATVRKVLSMPQVNIVKKTEVQTGGFSKESILPKRNSDKLIARKKDWDPKKYGGFDSPTVAYSVLVVAKVEKGKSKKLKSVKELLGITIMERSSFEKNPIDFLEAKGYKEVRKDLIVKLPKYSLFELENGRKRMLASGELQKGNELALPSKYVNFLYLASHYEKLKGSPEDNEQKQLFVEQHKHYLDEIIEQISEFSKRVILADANLDKVLSAYNKHRDKPIREQAENIIHLFTLTNLGAPAAFKYFDTTIDRKRYTSTKEVLDATFIHQSITGLYETRIDLSQLGGD

SEQ ID NO: 18 - protein, 1359 aa, Streptococcus pyogenes
MDKKYSIGLDIGTNSVGWAVITDDYKVPSKKFKVLGNTDRHSIKKNLIGALLFDSGETAEATRLKRTARRRYTRRKNRICYLQEIFSNEMAKVDDSFFHRLEESFLVEEDKKHERHPIFGNIVDEVAYHEKYPTIYHLRKKLVDSTDKADLRLIYLALAHMIKFRGHFLIEGDLNPDNSDVDKLFIQLVQTYNQLFEENINASGVDAKAILSARLSKSRRLENLIAQLPGEKKNGLFGNLIALSLGLTPNFKSNFDLAEDAKLQLSKDTYDDDLDNLLAQIGDQYADLFLAAKNLSDAILLSDILRVNTEITKAPLSASMIKRYDEHHQDLTLLKALVRQQLPEKYKEIFFDQSKNGYAGYIDGGASQEEFYKFIKPILEKMDGTEELLVKLNREDLLRKQRTFDNGSIPHQIHLGELHAILRRQEDFYPFLKDNREKIEKILTFRIPYYVGPLARGNSRFAWMTRKSEETITPWNFEEVVDKGASAQSFIERMTNFDKNLPNEKVLPKHSLLYEYFTVYNELTKVKYVTEGMRKPAFLSGEQKKAIVDLLFKTNRKVTVKQLKEDYFKKIECFDSVEISGVEDRFNASLGTYHDLLKIIKDKDFLDNEENEDILEDIVLTLTLFEDREMIEERLKTYAHLFDDKVMKQLKRRRYTGWGRLSRKLINGIRDKQSGKTILDFLKDGFANRNFMQLIHDDSLTFKEDIQKAQVSGQGDSLHEHIANLAGSPAIKKGILQTVKVVDELVKVMGRHKPENIVIEMARENQTTQKGQKNSRERMKRIEEGIKELGSQILKEHPVENTQLQNEKLYLYYLQNGRDMYVDQELDINRLSDYDVDHIVPQSFLKDDSIDNKVLTRSDKNRGKSDNVPSEEVVKKMKNYWRQLLNAKLITQRKFDNLTKAERGGLSELDKAGFIKRQLVETRQITKHVAQILDSRMNTKYDENDKLIREVKVITLKSKLVSDFRKDFQFYKVREINNYHHAHDAYLNAVVGTALIKKYPKLESEFVYGDYKVYDVSEQEIGKATAKYFFYSNIMNFFKTEITLANGEIRKRPLIETNGETGEIVWDKGRDFATVRKVLSMPQVNIVKKTEVQTGGFSKESILPKRNSDKLIARKKDWDPKKYGGFDSPTVAYSVLVVAKVEKGKSKKLKSVKELLGITIMERSSFEKNPIDFLEAKGYKEVKKDLIIKLPKYSLFELENGRKRMLASGELQKGNELALPSKYVNFLYLASHYEKLKGSPEDNEQKQLFVEQHKHYLDEIIEQISEFSKRVILADANLDKVLSAYNKHRDKPIREQAENIIHLFTLTNLGAPAAFKYFDTTIDRKRYTSTKEVLDATLIHQSITGLYETRIDLSQLGGD

SEQ ID NO: 19 - protein, 1359 aa, Streptococcus pyogenes
MDKKYSIGLDIGTNSVGWAVITDDYKVPSKKFKVLGNTDRHSIKKNLIGALLFDSGEIAEATRLKRTARRRYTRRKNRICYLQEIFSNEMAKVDDSFFHRLEESFLVEEDKKHERHPIFGNIVDEVAYHEKYPTIYHLRKKLVDSTDKADLRLIYLALAHMIKFRGHFLIEGDLNPDNSDVDKLFIQLVQTYNQLFEENINASGVDAKAILSARLSKSRRLENLIAQLPGEKKNGLFGNLIALSLGLTPNFKSNFDLAEDAKLQLSKDTYDDDLDNLLAQIGDQYADLFLAAKNLSDAILLSDILRLNSEITKAPLSASMIKRYDEHHQDLTLLKALVRQQLPEKYKEIFFDQSKNGYAGYIDGGASQEEFYKFIKPILEKMDGTEELLAKLNREDLLRKQRTFDNGSIPHQIHLGELHAILRRQEDFYPFLKDNREKIEKILTFRIPYYVGPLARGNSRFAWMTRKSEETITPWNFEEVVDKGASAQSFIERMTNFDKNLPNEKVLPKHSLLYEYFTVYNELTKVKYVTEGMRKPAFLSGEQKKAIVDLLFKTNRKVTVKQLKEDYFKKIECFDSVEISGVEDRFNASLGTYHDLLKIIKDKDFLDNEENEDILEDIVLTLTLFEDREMIEERLKTYAHLFDDKVMKQLKRRRYTVWGRLSRKLINGIRDKQSGKTILDFLKDGFANRNFMQLIHDDSLTFKEDIQKAQVSGQGDSLHEHIANLAGSPAIKKGILQTVKVVDELVKVMGRHKPENIVIEMARENQTTQKGQKNSRERMKRIEEGIKELGSQILKEHPVENTQLQNEKLYLYYLQNGRDMYVDQELDINRLSDYDVDHIVPQSFIKDDSIDNKVLTRSDKNRGKSDNVPSEEVVKKMKNYWRQLLNAKLITQRKFDNLTKAERGGLSELDKAGFIKRQLVETRQITKHVAQILDSRMNTKYDENDKLIREVKVITLKSKLVSDFRKDFQFYKVREINNYHHAHDAYLNAVVGTALIKKYPKLESEFVYGDYKVYDVSEQEIGKATAKYFFYSNIMNFFKTEITLANGEIRKRPLIETNGETGEIVWDKGRDFATVRKVLSMPQVNIVKKTEVQTGGFSKESILPKRNSDKLIARKKDWDPKKYGGFDSPTVAYSVLVVAKVEKGKSKKLKSVKELLGITIMERSSFEKNPIDFLEAKGYKEVRKDLIIKLPKYSLFELENGRKRMLASGELQKGNELALPSKYVNFLYLASHYEKLKGSPEDNEQKQLFVEQHKHYLDEIIEQISEFSKRVILADANLDKVLSAYNKHRDKPIREQAENIIHLFTLTNLGAPTAFKYFDTTIDRKRYTSTKEVLDATFIHQSITGLYETRIDLSQLGGD

SEQ ID NO: 20 - protein, 1359 aa, Streptococcus pyogenes
MDKKYSIGLDIGTNSVGWAVITDDYKVPSKKFKVLGNTDRHSIKKNLIGALLFDSGETAEATRLKRTARRRYTRRKNRICYLQEIFSNEIAKVDDSFFHRLEESFLVEEDKKHERHPIFGNIVDEVAYHEKYPTIYHLRKKLADSTDKADLRLIYLALAHMIKFRGHFLIEGDLNPDNSDVDKLFIQLVQTYNQLFEENINASRVDAKAILSARLSKSRRLENLIAQLPGEKRNGLFGNLIALSLGLTPNFKSNFDLAEDAKLQLSKDTYDDDLDNLLAQIGDQYADLFLAAKNLSDAILLSDILRVNTEITKAPLSASMIKRYDEHHQDLTLLKALVRQQLPEKYKEIFFDQSKNGYAGYIDGGASQEEFYKFIKPILEKMDGTEELLAKLNREDLLRKQRTFDNGSIPHQIHLGELHAILRRQEDFYPFLKDNREKIEKILTFRIPYYVGPLARGNSRFAWMTRKSEETITPWNFEEVVDKGASAQSFIERMTNFDKNLPNEKVLPKHSLLYEYFTVYNELTKVKYVTEGMRKPAFLSGEQKKAIVDLLFKTNRKVTVKQLKEDYFKKIECFDSVEISGVEDRFNASLGTYHDLLKIIKDKDFLDNEENEDILEDIVLTLTLFEDREMIEERLKTYAHLFDDKVMKQLKRRRYTGWGRLSRKLINGIRDKQSGKTILDFLKDGFANRNFMQLIHDDSLTFKEDLQKAQVSGQGDSLHEHIANLAGSPAIKKGILQTVKVVDELVKVMGRHKPENIVIEMARENQTTQKGQKNSRERMKRIEEGIKELGSDILKEYPVETTQLQNEKLYLYYLQNGRDMYVDQELDINRLSDYDVDHIVPQSFLKDDSIDNKVLTRSDKNRGKSDNVPSEEVVKKMKNYWKQLLNAKLITQRKFDNLTKAERGGLSELDKAGFIKRQLVETRQITKHVAQILDSRMNTKYDENDKLIREVRVITLKSKLVSDFRKDFQFYKVREINNYHHAHDAYLNAVVGTALIKKYPKLESEFVYGDYKVYDISEQEIGKATAKYFFYSNIMNFFKTEITLANGEIRKRPLIETNGETGEIVWDKGRDFATVRKVLSMPQVNIVKKTEVQTGGFSKESILPKRNSDKLIARKKDWDPKKYGGFDSPTVAYSVLVVAKVEKGKSKKLKSVKELVGITIMERSSFEKDPVDFLEAKGYKEVRKDLIIKLPKYSLFELENGRKRMLASGELQKGNELALPSKYVNFLYLASHYEKLKGSPEDNEQKQLFVEQHKHYLDEIIEQISEFSKRVILADANLDKVLSAYNKHRDKPIREQAENIIHLFTLTNLGAPAAFKCFDTTIGRNRYKSIKEVLDATLIHQSITGLYETRIDLSQLGGD

SEQ ID NO: 21 - protein, 1358 aa, Streptococcus pyogenes
MDKKYSIGLDIGTNSVGWAVITDDYKVPSKKFKVLGNTDRHSIKKNLIGALLFGSGETAEATRLKRTARRRYTRRKNRICYLQEIFSNEMAKVDDSFFHRLEESFLVEEDKKHERHPIFGNIVDEVAYHEKYPTIYHLRKKLADSTDKADLRLIYLALAHMIKFRGHFLIEGDLNPDNSDVDKLFIQLVQIYNQLFEENINASRVDAKAILSARLSKSRRLENLIAQLPGEKRNGLFGNLIALSLGLTPNFKSNFDLAEDAKLQLSKDTYDDDLDNLLAQIGDQYADLFLAAKNLSDAILLSDILRVNSEITKAPLSASMIKRYDEHHQDLTLLKALVRQQLPEKYKEIFFDQSKNGYAGYIDGGASQEEFYKFIKPILEKMDGTEELLVKLNREDLLRKQRTFDNGSIPHQIHLGELHAILRRQEDFYPFLKDNREKIEKILTFRIPYYVGPLARGNSRFAWMTRKSEETITPWNFEEVVDKGASAQSFIERMTNFDKNLPNEKVLPKHSLLYEYFTVYNELTKVKYVTEGMRKPAFLSGEQKKAIVDLLFKTNRKVTVKQLKEDYFKKIECFDSVEISGVEDRFNASLGAYHDLLKIIKDKDFLDNEENEDILEDIVLTLTLFEDRGMIEERLKTYAHLFDDKVMKQLKRRRYTGWGRLSRKLINGIRDKQSGKTILDFLKDGFANRNFMQLIHDDSLTFKEDIQKAQVSGQGHSLHEQIANLAGSPAIKKGILQTVKIVDELVKVMGHKPENIVIEMARENQTTQKGQKNSRERMKRIEEGIKELGSQILKEHPVENTQLQNEKLYLYYLQNGRDMYVDQELDINRLSDYDVDHIVPQSFIKDDSIDNKVLTRSDKNRGKSDNVPSEEVVKKMKNYWRQLLNAKLITQRKFDNLTKAERGGLSELDKAGFIKRQLVETRQITKHVAQILDSRMNTKYDENDKLIREVKVITLKSKLVSDFRKDFQFYKVREINNYHHAHDAYLNAVVGTALIKKYPKLESEFVYGDYKVYDVSEQEIGKATAKYFFYSNIMNFFKTEITLANGEIRKRPLIETNGETGEIVWDKGRDFATVRKVLSMPQVNIVKKTEVQTGGFSKESILPKRNSDKLIARKKDWDPKKYGGFDSPTVAYSVLVVAKVEKGKSKKLKSVKELLGITIMERSSFEKNPIDFLEAKGYKEVKKDLIIKLPKYSLFELENGRKRMLASGELQKGNELALPSKYVNFLYLASHYEKLKGSPEDNEQKQLFVEQHKHYLDEIIEQISEFSKRVILADANLDKVLSAYNKHRDKPIREQAENIIHLFTLTNLGAPAAFKYFDTTIDRKRYTSTKEVLDATLIHQSITGLYETRIDLSQLGGD

SEQ ID NO: 22 - protein, 1359 aa, Streptococcus pyogenes
MDKKYSIGLDIGTNSVGWAVITDDYKVPSKKFKVLGNTDRHSIKKNLIGALLFDSGETAEATRLKRTARRRYTRRKNRICYLQEIFSNEMAKVDDSFFHRLEESFLVEEDKKHERHPIFGNIVDEVAYHEKYPTIYHLRKKLVDSTDKADLRLIYLALAHMIKFRGHFLIEGDLNPDNSDVDKLFIQLVQTYNQLFEENINASGVDAKAILSARLSKSRRLENLIAQLPGEKKNGLFGNLIALSLGLTPNFKSNFDLAEDAKLQLSKDTYDDDLDNLLAQIGDQYADLFLAAKNLSDAILLSDILRLNSEITKAPLSASMIKRYDEHHQDLTLLKALVRQQLPEKYKEIFFDQSKNGYAGYIDGGASQEEFYKFIKPILEKMDGTEELLAKLNREDLLRKQRTFDNGSIPHQIHLGELHAILRRQEDFYPFLKDNREKIEKILTFRIPYYVGPLARGNSRFAWMTRKSEETITPWNFEEVVDKGASAQSFIERMTNFDKNLPNEKVLPKHSLLYEYFTVYNELTKVKYVTEGMRKPAFLSGEQKKAIVDLLFKTNRKVTVKQLKEDYFKKIECFDSVEISGVEDRFNASLGTYHDLLKIIKDKDFLDNEENEDILEDIVLTLTLFEDREMIEERLKTYAHLFDDKVMKQLKRRRYTGWGRLSRKLINGIRDKQSGKTILDFLKDGFANRNFMQLIHDDSLTFKEDIQKAQVSGQGDSLHEHIANLAGSPAIKKGILQTVKVVDELVKVMGRHKPENIVIEMARENQTTQKGQKNSRERMKRIEEGIKELGSQILKEHPVENTQLQNEKLYLYYLQNGRDMYVDQELDINRLSDYDVDHIVPQSFIKDDSIDNKVLTRSDKNRGKSDNVPSEEVVKKMKNYWRQLLNAKLITQRKFDNLTKAERGGLSELDKAGFIKRQLVETRQITKHVAQILDSRMNTKYDENDKLIREVKVITLKSKLVSDFRKDFQFYKVREINNYHHAHDAYLNAVVGTALIKKYPKLESEFVYGDYKVYDVSEQEIGKATAKYFFYSNIMNFFKTEITLANGEIRKRPLIETNGETGEIVWDKGRDFATVRKVLSMPQVNIVKKTEVQTGGFSKESILPKRNSDKLIARKKDWDPKKYGGFDSPTVAYSVLVVAKVEKGKSKKLKSVKELLGLTIMERSSFEKNPIDFLEAKGYKEVKKDLIIKLPKYSLFELENGRKRMLASGELQKGNELALPSKYVNFLYLASHYEKLKGSPEDNEQKQLFVEQHKHYLDEIIEQISEFSKRVILADANLDKVLSAYNKHRDKPIREQAENIIHLFTLTNLGAPAAFKYFDTTIDRKRYTSTKEVLDATLIHQSITGLYETRIDLSQLGGD

SEQ ID NO: 23 - protein, 1358 aa, Streptococcus pyogenes
MDKKYSIGLDIGTNSVGWAVITDDYKVPSKKLKVLGNTDRHGIKKNLIGALLFDSGETAEATRLKRTARRRYTRRKNRICYLQEIFSNEMAKVDDSFFHRLEESFLVEEDKKHERHPIFGNIVDEVAYHEKYPTIYHLRKKLADSTDKVDLRLIYLALAHMIKFRGHFLIEGDLNPDNSDVDKLFIQLVQTYNQLFEENINASRVDAKAILSARLSKSRRLENLIAQLPGEKKNGLFGNLIALSLGLTPNFKSNFDLAEDAKLQLSKDTYDDDLDNLLAQIGDQYADLFLAAKNLSDAILLSDILRVNSEITKAPLSASMIKRYDEHHQDLTLLKALVRQQLPEKYKEIFFDQSKNGYAGYIDGGASQEEFYKFIKPILEKMDGTEELLAKLNREDLLRKQRTFDNGSIPYQIHLGELHAILRRQEDFYPFLKDNREKIEKILTFRIPYYVGPLARGNSRFAWMTRKSEETITPWNFEEVVDKGASAQSFIERMTNFDKNLPNEKVLPKHSLLYEYFTVYNELTKVKYVTEGMRKPAFLSGEQKKAIVDLLFKTNRKVTVKQLKEDYFKKIECFDSVEISGVEDRFNTSLGTYHDLLKIIKDKDFLDNEENEDILEDIVLTLTLFEDKEMIEERLKKYANLFDDKVMKQLKRRHYTGWGRLSRKLINGIRDKQSGKTILDFLKDGFANRNFMQLINDDSLTFKEAIQKAQVSGQGHSLHEQIANLAGSPAIKKGILQTVKIVDELVKVMGHKPENIVIEMARENQTTQKGQKNSRERMKRIEEGIKELGSQILKEHPVENTQLQNEKLYLYYLQNGRDMYVDQELDINRLSDYDVDHIVPQSFLKDDSIDNKVLTRSDKNRGKSDNVPSEEVVKKMKNYWRQLLNAKLITQRKFDNLTKAERGGLSELDKAGFIKRQLVETRQITKHVAQILDSRMNTKYDENDKLIREVKVITLKSKLVSDFRKDFQFYKVREINNYHHAHDAYLNAVVGTALIKKYPKLESEFVYGDYKVYDVSEQEIGKATAKYFFYSNIMNFFKTEITLANGEIRKRPLIETNGETGEIVWDKGRDFATVRKVLSMPQVNIVKKTEVQTGGFSKESILPKRNSDKLIARKKDWDPKKYGGFDSPTVAYSVLVVAKVEKGKSKKLKSVKELLGITIMERSSFEKNPIDFLEAKGYKEVRKDLIIKLPKYSLFELENGRKRMLASGELQKGNELALPSKYVNFLYLASHYEKLKGSPEDNEQKQLFVEQHKHYLDEIIEQISEFSKRVILADANLDKVLSAYNKHRDKPIREQAKNIIHLFTLTNLGAPAAFKYFDTTIERNRYKSIKEVLDATLIHQSITGLYETRIDLSQLGGD

SEQ ID NO: 24 - protein, 1358 aa, Streptococcus pyogenes
MDKKYSIGLDIGTNSVGWAVITDDYKVPSKKLKVLGNTDRHGIKKNLIGALLFDSGETAEATRLKRTARRRYTRRKNRICYLQEIFSNEMAKVDDSFFHRLEESFLVEEDKKHERHPIFGNIVDEVAYHEKYPTIYHLRKKLADSTDKVDLRLIYLALAHMIKFRGHFLIEGDLNPDNSDVDKLFIQLVQTYNQLFEENINASRVDAKAILSARLSKSRRLENLIAQLPGEKKNGLFGNLIALSLGLTPNFKSNFDLAEDAKLQLSKDTYDDDLDNLLAQIGDQYADLFLAAKNLSDAILLSDILRVNSEITKAPLSASMIKRYDEHHQDLTLLKALVRQQLPEKYKEIFFDQSKNGYAGYIDGGASQEEFYKFIKPILEKMDGTEELLAKLNREDLLRKQRTFDNGSIPYQIHLGELHAILRRQEDFYPFLKDNREKIEKILTFRIPYYVGPLARGNSRFAWMTRKSEETITPWNFEEVVDKGASAQSFIERMTNFDKNLPNEKVLPKHSLLYEYFTVYNELTKVKYVTEGMRKPAFLSGEQKKAIVDLLFKTNRKVTVKQLKEDYFKKIECFDSVEISGVEDRFNTSLGTYHDLLKIIKDKDFLDNEENEDILEDIVLTLTLFEDKEMIEERLKKYANLFDDKVMKQLKRRHYTGWGRLSRKLINGIRDKQSGKTILDFLKDGFANRNFMQLINDDSLTFKEAIQKAQVSGQGHSLHEQIANLAGSPAIKKGILQTVKIVDELVKVMGHKPENIVIEMARENQTTQKGQKNSRERMKRIEEGIKELGSQILKEHPVENTQLQNEKLYLYYLQNGRDMYVDQELDINRLSDYDVDHIVPQSFLKDDSIDNKVLTRSDKNRGKSDNVPSEEVVKKMKNYWRQLLNAKLITQRKFDNLTKAERGGLSELDKAGFIKRQLVETRQITKHVAQILDSRMNTKYDENDKLIREVKVITLKSKLVSDFRKDFQFYKVREINNYHHAHDAYLNAVVGTALIKKYPKLESEFVYGDYKVYDVSEQEIGKATAKYFFYSNIMNFFKTEITLANGEIRKRPLIETNGETGEIVWDKGRDFATVRKVLSMPQVNIVKKTEVQTGGFSKESILPKRNSDKLIARKKDWDPKKYGGFDSPTVAYSVLVVAKVEKGKSKKLKSVKELLGITIMERSSFEKNPIDFLEAKGYKEVRKDLIIKLPKYSLFELENGRKRMLASGELQKGNELALPSKYVNFLYLASHYEKLKGSPEDNEQKQLFVEQHKHYLDEIIEQISEFSKRVILADANLDKVLSAYNKHRDKPIREQAKNIIHLFTLTNLGAPAAFKYFDTTIERNRYKSIKEVLDATLIHQSITGLYEIRIDLSQLGGD

SEQ ID NO: 25 - protein, 1359 aa, Streptococcus pyogenes
MDKKYSIGLDIGTNSVGWAVITDDYKVPSKKFKVLGNTDRHSIKKNLIGALLFDSGETAEATRLKRTARRRYTRRKNRICYLQEIFSNEMAKVDDSFFHRLEESFLVEEDKKHERHPIFGNIVDEVAYHEKYPTIYHLRKKLVDSTDKADLRLIYLALAHMIKFRGHFLIEGDLNPDNSDVDKLFIQLVQTYNQLFEENINASGVDAKAILSARLSKSRRLENLIAQLPGEKKNGLFGNLIALSLGLTPNFKSNFDLAEDAKLQLSKDTYDDDLDNLLAQIGDQYADLFLAAKNLSDAILLSDILRVNTEITKASLSASMIKRYDEHHQDLTLLKALVRQQLPEKYKEIFFDQSKNGYAGYIDGGASQEEFYKFIKPILEKMDGTEELLVKLNREDLLRKQRTFDNGSIPHQIHLGELHAILRRQEDFYPFLKDNREKIEKILTFRIPYYVGPLARGNSRFAWMTRKSEETITPWNFEEVVDKGASAQSFIERMTNFDKNLPNEKVLPKHSLLYEYFTVYNELTKVKYVTEGMRKPAFLSGEQKKAIVDLLFKTNRKVTVKQLKEDYFKKIECFDSVEISGVEDRFNASLGTYHDLLKIIKDKDFLDNEENEDILEDIVLTLTLFEDREMIEERLKTYAHLFDDKVMKQLKRRRYTGWGRLSRKLINGIRDKQSGKTILDFLKDGFANRNFMQLIHDDSLTFKEDLQKAQVSGQGDSLHEHIANLAGSPAIKKGILQTVKVVDELVKVMGRHKPENIVIEMARENQTTQKGQKNSRERMKRIEEGIKELGSDILKEYPVENTQLQNEKLYLYYLQNGRDMYVDQELDINRLSDYDVDHIVPQSFIKDDSIDNKVLTRSDKNRGKSDNVPSEEVVKKMKNYWRQLLNAKLITQRKFDNLTKAERGGLSELDKAGFIKRQLVETRQITKHVAQILDSRMNTKYDENDKLIREVKVITLKSKLVSDFRKDFQFYKVREINNYHHAHDAYLNAVVGTALIKKYPKLESEFVYGDYKVYDVSEQEIGKATAKYFFYSNIMNFFKTEITLANGEIRKRPLIETNGETGEIVWDKGRDFATVRKVLSMPQVNIVKKTEVQTGGFSKESILPKRNSDKLIARKKDWDPKKYGGFDSPTVAYSVLVVAKVEKGKSKKLKSVKELLGITIMERSSFEKNPIDFLEAKGYKEVRKDLIIKLPKYSLFELENGRKRMLASGELQKGNELALPSKYVNFLYLASHYEKLKGSPEDNEQKQLFVEQHKHYLDEIIEQISEFSKRVILADANLDKVLSAYNKHRDKPIREQAENIIHLFTLTNLGAPAAFKYFDTTIGRNRYKSIKEVLDATLIHQSITGLYETRIDLSQLGGD

SEQ ID NO: 26 - protein, 1359 aa, Streptococcus pyogenes
MDKKYSIGLDIGTNSVGWAVITDDYKVPSKKFKVLGNTDRHGIKKNLIGALLFDSGETAEATRLKRTARRRYTRRKNRICYLQEIFSNEMAKVDDSFFHRLEESFLVEEDKKHERHPIFGNIVDEVAYHEKYPTIYHLRKKLADSTDKVDLRLIYLALAHMIKFRGHFLIEGDLNPDNSDVDKLFIQLVQTYNQLFEENINASRVDAKAILSARLSKSRRLENLIAQLPGEKKNGLFGNLIALSLGLTPNFKSNFDLAEDAKLQLSKDTYDDDLDNLLAQIGDQYADLFLAAKNLSDATLLSDILRVNSEITKAPLSASMIKRYDEHHQDLTLLKALVRQQLPEKYKEIFFDQSKNGYAGYIDGGASQEEFYKFIKPILEKMDGTEELLAKLNREDLLRKQRTFDNGSIPYQIHLGELHAILRRQEDFYPFLKDNREKIEKILTFRIPYYVGPLARGNSRFAWMTRKSEETITPWNFEEVVDKGASAQSFIERMTNFDKNLPNEKVLPKHSLLYEYFTVYNELTKVKYVTEGMRKPAFLSGEQKKAIVDLLFKTNRKVTVKQLKEDYFKKIECFDSVEISGVEDRFNASLGTYHDLLKIIKDKDFLDNEENEDILEDIVLTLTLFEDREMIEERLKTYAHLFDDKVMKQLKRRRYTGWGRLSRKLINGIRDKQSGKTILDFLKDGFANRNFMQLIHDDSLTFKEDIQKAQVSGQGDSLHEHIANLAGSPAIKKGILQTVKVVDELVKVMGRHKPENIVIEMARENQTTQKGQKNSRERMKRIEEGIKELGSDILKEYPVENTQLQNEKLYLYYLQNGRDMYVDQELDINRLSDYDVDHIVPQSFLKDDSIDNKVLTRSDKNRGKSDNVPSEEVVKKMKNYWRQLLNAKLITQRKFDNLTKAERGGLSELDKAGFIKRQLVETRQITKHVAQILDSRMNTKYDENDKLIREVKVITLKSKLVSDFRKDFQFYKVREINNYHHAHDAYLNAVVGTALIKKYPKLESEFVYGDYKVYDVSEQEIGKATAKYFFYSNIMNFFKTEITLANGEIRKRPLIETNGETGEIVWDKGRDFATVRKVLSMPQVNIVKKTEVQTGGFSKESILPKRNSDKLIARKKDWDPKKYGGFDSPTVAYSVLVVAKVEKGKSKKLKSVKELLGITIMERSSFEKNPIDFLEAKGYKEVRKDLIIKLPKYSLFELENGRKRMLASGELQKGNELALPSKYVNFLYLASHYEKLKGSPEDNEQKQLFVEQHKHYLDEIIEQISEFSKRVILADANLDKVLSAYNKHRDKPIREQAENIIHLFTLTNLGAPAAFKYFDTTIDRKRYTSTKEVLDATLIHQSITGLYETRIDLSQLGGD

SEQ ID NO: 27 - protein, 1359 aa, Streptococcus pyogenes
MDKKYSIGLDIGTNSVGWAVITDDYKVPSKKFKVLGNTDRHSIKKNLIGALLFDSGETAEATRLKRTARRRYTRRKNRICYLQEIFSNEMAKVDDSFFHRLEESFLVEEDKKHERHPIFGNIVDEVAYHEKYPTIYHLRKKLADSTDKADLRLIYLALAHMIKFRGHFLIEGDLNPDNSDVDKLFIQLVQTYNQLFEENINASRVDAKAILSARLSKSRRLENLIAQLPGEKRNGLFGNLIALSLGLTPNFKSNFDLAEDAKLQLSKDTYDDDLDNLLAQIGDQYADLFLAAKNLSDAILLSDILRVNSEITKAPLSASMIKRYDEHHQDLTLLKALVRQQLPEKYKEIFFDQSKNGYAGYIDGGASQEEFYKFIKPILEKMDGTEELLAKLNREDLLRKQRTFDNGSIPHQIHLGELHAILRRQEDFYPFLKDNREKIEKILTFRIPYYVGPLARGNSRFAWMTRKSEETITPWNFEEVVDKGASAQSFIERMTNFDKNLPNEKVLPKHSLLYEYFTVYNELTKVKYVTEGMRKPEFLSGEQKKAIVDLLFKTNRKVTVKQLKEDYFKKIECFDSVEISGVEDRFNASLGTYHDLLKIIKDKDFLDNEENEDILEDIVLTLTLFEDREMIEERLKTYAHLFDDKVMKQLKRRRYTGWGRLSRKLINGIRDKQSGKTILDFLKDGFANRNFMQLIHDDSLTFKEDIQKAQVSGQGDSLHEHIANLAGSPAIKKGILQTVKVVDELVKVMGRHKPENIVIEMARENQTTQKGQKNSRERMKRIEEGIKELGSDILKEYPVENTQLQNEKLYLYYLQNGRDMYVDQELDINRLSDYDVDHIVPQSFIKDDSIDNKVLTRSDKNRGKSDNVPSEEVVKKMKNYWKQLLNAKLITQRKFDNLTKAERGGLSELDKAGFIKRQLVETRQITKHVAQILDSRMNTKYDENDKLIREVKVITLKSKLVSDFRKDFQFYKVREINNYHHAHDAYLNAVVGTALIKKYPKLESEFVYGDYKVYDVSEQEIGKATAKYFFYSNIMNFFKTEITLANGEIRKRPLIETNGETGEIVWDKGRDFATVRKVLSMPQVNIVKKTEVQTGGFSKESILPKRNSDKLIARKKDWDPKKYGGFDSPTVAYSVLVVAKVEKGKSKKLKSVKELLGITIMERSSFEKNPIDFLEAKGYKEVRKDLIIKLPKYSLFELENGRKRMLASGELQKGNELALPSKYVNFLYLASHYEKLKGSPEDNEQKQLFVEQHKHYLDEIIEQISEFSKRVILADANLDKVLSAYNKHRDKPIREQAENIIHLFTLTNFGAPAAFIYFDTTIGRNRYKSIKEVLDATLIHQSITGLYETRIDLSQLGGD

SEQ ID NO: 28 - protein, 1359 aa, Streptococcus pyogenes
MDKKYSIGLDIGTNSVGWAVITDDYKVPSKKFKVLGNTDRHSIKKNLIGALLFDSGETAEATRLKRTARRRYTRRKNRICYLQEIFSNEIAKVDDSFFHRLEESFLVEEDKKHERHPIFGNIVDEVAYHEKYPTIYHLRKKLADSTDKADLRLIYLALAHMIKFRGHFLIEGDLNPDNSDVDKLFIQLVQTYNQLFEENINASRVDAKAILSARLSKSRRLENLIAQLPGEKRNGLFGNLIALSLGLTPNFKSNFDLAEDAKLQLSKDTYDDDLDNLLAQIGDQYADLFLAAKNLSDAILLSDILRVNTEITKAPLSASMIKRYDEHHQDLTLLKALVRQQLPEKYKEIFFDQSKNGYAGYIDGGASQEEFYKFIKPILEKMDGTEELLAKLNREDLLRKQRTFDNGSIPHQIHLGELHAILRRQEDFYPFLKDNREKIEKILTFRIPYYVGPLARGNSRFAWMTRKSEETITPWNFEEVVDKGASAQSFIERMTNFDKNLPNEKVLPKHSLLYEYFTVYNELTKVKYVTEGMRKPAFLSGEQKKAIVDLLFKTNRKVTVKQLKEDYFKKIECFDSVEISGVEDRFNASLGTYHDLLKIIKDKDFLDNEENEDILEDIVLTLTLFEDREMIEERLKTYAHLFDDKVMKQLKRRRYTGWGRLSRKLINGIRDKQSGKTILDFLKDGFANRNFMQLIHDDSLTFKEDLQKAQVSGQGDSLHEHIANLAGSPAIKKGILQTVKVVDELVKVMGRHKPENIVIEMARENQTTQKGQKNSRERMKRIEEGIKELGSDILKEYPVENTQLQNEKLYLYYLQNGRDMYVDQELDINRLSDYDVDHIVPQSFLKDDSIDNKVLTRSDKNRGKSDNVPSEEVVKKMKNYWKQLLNAKLITQRKFDNLTKAERGGLSELDKAGFIKRQLVETRQITKHVAQILDSRMNTKYDENDKLIREVRVITLKSKLVSDFRKDFQFYKVREINNYHHAHDAYLNAVVGTALIKKYPKLESEFVYGDYKVYDISEQEIGKATAKYFFYSNIMNFFKTEITLANGEIRKRPLIETNGETGEIVWDKGRDFATVRKVLSMPQVNIVKKTEVQTGGFSKESILPKRNSDKLIARKKDWDPKKYGGFDSPTVAYSVLVVAKVEKGKSKKLKSVKELVGITIMERSSFEKDPVDFLEAKGYKEVRKDLIIKLPKYSLFELENGRKRMLASGELQKGNELALPSKYVNFLYLASHYEKLKGSPEDNEQKQLFVEQHKHYLDEIIEQISEFSKRVILADANLDKVLSAYNKHRDKPIREQAENIIHLFTLTNLGAPAAFKYFDTTIGRNRYKSIKEVLDATLIHQSITGLYETRIDLSQLGGD

SEQ ID NO: 29 - protein, 1359 aa, Streptococcus pyogenes
MDKKYSIGLDIGTNSVGWAVITDDYKVPSKKFKVLGNTDRHSIKKNLIGALLFDSGETAEATRLKRTARRRYTRRKNRICYLQEIFSNEIAKVDDSFFHRLEESFLVEEDKKHERHPIFGNIVDEVAYHEKYPTIYHLRKKLADSTDKADLRLIYLALAHMIKFRGHFLIEGGLNPDNSDVDKLFIQLVQTYNQLFEENINASRVDAKAILSARLSKSRRLENLIAQLPGEKRNGLFGNLIALSLGLTPNFKSNFDLAEDAKLQLSKDTYDDDLDNLLAQIGDQYADLFLAAKNLSDAILLSDILRVNTEITKAPLSASMIKRYDEHHQDLTLLKALVRQQLPEKYKEIFFDQSKNGYAGYIDGGASQEEFYKFIKPILEKMDGTEELLAKLNREDLLRKQRTFDNGSIPHQIHLGELHAILRRQEDFYPFLKDNREKIEKILTFRIPYYVGPLARGNSRFAWMTRKSEETITPWNFEEVVDKGASAQSFIERMTNFDKNLPNEKVLPKHSLLYEYFTVYNELTKVKYVTEGMRKPAFLSGEQKKAIVDLLFKTNRKVTVKQLKEDYFKKIECFDSVEISGVEDRFNASLGTYHDLLKIIKDKDFLDNEENEDILEDIVLTLTLFEDREMIEERLKTYAHLFDDKVMKQLKRRRYTGWGRLSRKLINGIRDKQSGKTILDFLKDGFANRNFMQLIHDDSLTFKEDLQKAQVSGQGDSLHEHIANLAGSPAIKKGILQTVKVVDELVKVMGRHKPENIVIEMARENQTTQKGQKNSRERMKRIEEGIKELGSDILKEYPVENTQLQNEKLYLYYLQNGRDMYVDQELDINRLSDYDVDHIVPQSFLKDDSIDNKVLTRSDKNRGKSDNVPSEEVVKKMKNYWKQLLNAKLITQRKFDNLTKAERGGLSELDKAGFIKRQLVETRQITKHVAQILDSRMNTKYDENDKLIREVRVITLKSKLVSDFRKDFQFYKVREINNYHHAHDAYLNAVVGTALIKKYPKLESEFVYGDYKVYDISEQEIGKATAKYFFYSNIMNFFKTEITLANGEIRKRPLIETNGETGEIVWDKGRDFATVRKVLSMPQVNIVKKTEVQTGGFSKESILPKRNSDKLIARKKDWDPKKYGGFDSPTVAYSVLVVAKVEKGKSKKLKSVKELVGITIMERSSFEKDPVDFLEAKGYKEVRKDLIIKLPKYSLFELENGRKRMLASGELQKGNELALPSKYVNFLYLASHYEKLKGSPEDNEQKQLFVEQHKHYLDEIIEQISEFSKRVILADANLDKVLSAYNKHRDKPIREQAENIIHLFTLTNLGAPAAFKYFDTTIGRNRYKSIKEVLDATLIHQSITGLYETRIDLSQLGGD

SEQ ID NO: 30 - protein, 1359 aa, Streptococcus pyogenes
MDKKYSIGLDIGTNSVGWAVITDDYKVPSKKFKVLGNTDRHSIKKNLIGALLFDSGETAEATRLKRTARRRYTRRKNRICYLQEIFSNEMAKVDDSFFHRLEESFLVEEDKKHERHPIFGNIVDEVAYHEKYPTIYHLRKKLVDSTDKADLRLIYLALAHMIKFRGHFLIEGDLNPDNSDVDKLFIQLVQTYNQLFEENINANGVDAKAILSARLSKSRRLENLIAQLPGEKKNGLFGNLIALSLGLTPNFKSNFDLAEDAKLQLSKDTYDDDLDNLLAQIGDQYADLFLAAKNLSDAILLSDILRVNTEITKAPLSASMIKRYDEHHQDLTLLKALVRQQLPEKYKEIFFDQSKNGYAGYIDGGASQEEFYKFIKPILEKMDGTEELLVKLNREDLLRKQRTFDNGSIPHQIHLGELHAILRRQEDFYPFLKDNREKIEKILTFRIPYYVGPLARGNSRFAWMTRKSEETITPWNFEEVVDKGASAQSFIERMTNFDKNLPNEKVLPKHSLLYEYFTVYNELTKVKYVTEGMRKPAFLSGEQKKAIVDLLFKTNRKVTVKQLKEDYFKKIECFDSVEISGVEDRFNASLGTYHDLLKIIKDKDFLDNEENEDILEDIVLTLTLFEDREMIEERLKTYAHLFDDKVMKQLKRRRYTGWGRLSRKLINGIRDKQSGKTILDFLKDGFANRNFMQLIHDDSLTFKEDIQKAQVSGQGDSLHEHIANLAGSPAIKKGILQTVKVVDELVKVMGRHKPENIVIEMARENQTTQKGQKNSRERMKRIEEGIKELGSQILKEHPVENTQLQNEKLYLYYLQNGRDMYVDQELDINRLSDYDVDHIVPQSFLKDDSIDNKVLTRSDKNRGKSDNVPSEEVVKKMKNYWRQLLNAKLITQRKFDNLTKAERGGLSELDKAGFIKRQLVETRQITKHVAQILDSRMNTKYDENDKLIREVKVITLKSKLVSDFRKDFQFYKVREINNYHHAHDAYLNAVVGTALIKKYPKLESEFVYGDYKVYDVSEQEIGKATAKYFFYSNIMNFFKTEITLANGEIRKRPLIETNGETGEIVWDKGRDFATVRKVLSMPQVNIVKKTEVQTGGFSKESILPKRNSDKLIARKKDWDPKKYGGFDSPTVAYSVLVVAKVEKGKSKKLKSVKELLGITIMERSSFEKNPIDFLEAKGYKEVKKDLIIKLPKYSLFELENGRKRMLASGELQKGNELALPSKYVNFLYLASHYEKLKGSPEDNEQKQLFVEQHKHYLDEIIEQISEFSKRVILADANLDKVLSAYNKHRDKPIREQAENIIHLFTLTNLGAPAAFKYFDTTIDRKRYTSTKEVLDATLIHQSITGLYETRIDLSQLGGD

SEQ ID NO: 31 - protein, 1359 aa, Streptococcus pyogenes
MDKKYSIGLDIGTNSVGWAVITDDYKVPSKKFKVLGNTDRHSIKKNLIGALLFDSGETAEATRLKRTARRRYTRRKNRICYLQEIFSNEMAKVDDSFFHRLEESFLVEEDKKHERHPIFGNIVDEVAYHEKYPTIYHLRKKLADSTDKADLRLIYLALAHMIKFRGHFLIEGDLNPDNSDVDKLFIQLVQTYNQLFEENINASRVDAKAILSARLSKSRRLENLIAQLPGEKKNGLFGNLIALLLGLTPNFKSNFDLAEDAKLQLSKDTYDDDLDNLLAQIGDQYADLFLAAKNLSDAILLSDILRVNSEITKAPLSASMIKRYDEHHQDLTLLKALVRQQLPEKYKEIFFDQSKNGYAGYIDGGASQEEFYKFIKPILEKMDGTEELLAKLNREDLLRKQRTFDNGSIPHQIHLGELHAILRRQEDFYPFLKDNREKIEKILTFRIPYYVGPLARGNSRFAWMTRKSEETITPWNFEEVVDKGASAQSFIERMTNFDKNLPNEKVLPKHSLLYEYFTVYNELTKVKYVTEGMRKPAFLSGEQKKAIVDLLFKTNRKVTVKQLKEDYFKKIECFDSVEISGVEDRFNASLGTYHDLLKIIKDKDFLDNEENEDILEDIVLTLTLFEDKEMIEERLKKYAHLFDDKVMKQLKRRRYTGWGRLSRKLINGIRDKQSGKTILDFLKDGFANRNFMQLIHDDSLTFKEDIQKAQVSGQGDSLHEHIANLAGSPAIKKGILQTVKVVDELVKVMGRHKPENIVIEMARENQTTQKGQKNSRERMKRIEEGIKELGSDILKEYPVENTQLQNEKLYLYYLQNGRDMYVDQELDINRLSDYDVDHIVPQSFLKDDSIDNKVLTRSDKNRGKSDNVPSEEVVKKMKNYWKQLLNAKLITQRKFDNLTKAERGGLSELDKAGFIKRQLVETRQITKHVAQILDSRMNTKYDENDKLIREVRVITLKSKLVSDFRKDFQFYKVREINNYHHAHDAYLNAVVGTALIKKYPKLESEFVYGDYKVYDVSEQEIGKATAKYFFYSNIMNFFKTEITLANGEIRKRPLIETNGETGEIVWDKGRDFATVRKVLSMPQVNIVKKTEVQTGGFSKESILPKRNSDKLIARKKDWDPKKYGGFDSPTVAYSVLVVAKVEKGKSKKLKSVKELLGITIMERSSFEKNPIDFLEAKGYKEVRKDLIIKLPKYSLFELENGRKRMLASGELQKGNELALPSKYVNFLYLASHYEKLKGSPEDNEQKQLFVEQHKHYLDEIIEQISEFSKRVILADANLDKVLSAYNKHRDKPIREQAENIIHLFTLTNLGAPAAFKYFDTTIDRKRYTSTKEVLDATLIHQSITGLYETRIDLSQLGGD

SEQ ID NO: 32 - protein, 1359 aa, Streptococcus pyogenes
MDKKYSIGLDIGTNSVGWAVITDDYKVPSKKFKVLGNTDRHSIKKNLIGALLFDSGEIAEATRLKRTARRRYTRRKNRICYLQEIFSNEMAKVDDSFFHRLEESFLVEEDKKHERHPIFGNIVDEVAYHEKYPTIYHLRKKLVDSTDKADLRLIYLALAHMIKFRGHFLIEGDLNPDNSDVDKLFIQLVQTYNQLFEENINASGVDAKAILSARLSKSRRLENLIAQLPGEKKNGLFGNLIALSLGLTPNFKSNFDLAEDAKLQLSKDTYDDDLDNLLAQIGDQYADLFLAAKNLSDAILLSDILRLNSEITKAPLSASMIKRYDEHHQDLTLLKALVRQQLPEKYKEIFFDQSKNGYAGYIDGGASQEEFYKFIKPILEKMDGTEELLAKLNRKDLLRKQRTFDNGSIPHQIHLGELHAILRRQEDFYPFLKDNREKIEKILTFRIPYYVGPLARGNSRFAWMTRKSEETITPWNFEEVVDKGASAQSFIERMTNFDKNLPNEKVLPKHSLLYEYFTVYNELTKVKYVTEGMRKPAFLSGEQKKAIVDLLFKTNRKVTVKQLKEDYFKKIECFDSVEISGVEDRFNASLGTYHDLLKIIKDKDFLDNEENEDILEDIVLTLTLFEDREMIEERLKTYAHLFDDKVMKQLKRRRYTGWGRLSRKLINGIRDKQSGKTILDFLKDGFANRNFMQLIHDDSLTFKEDIQKAQVSGQGDSLHEHIANLAGSPAIKKGILQTVKVVDELVKVMGRHKPENIVIEMARENQTTQKGQKNSRERMKRIEEGIKELGSQILKEHPVENTQLQNEKLYLYYLQNGRDMYVDQELDINRLSDYDVDHIVPQSFIKDDSIDNKVLTRSDKNRGKSDNVPSEEVVKKMKNYWRQLLNAKLITQRKFDNLTKAERGGLSELDKAGFIKRQLVETRQITKHVAQILDSRMNTKYDENDKLIREVKVITLKSKLVSDFRKDFQFYKVREINNYHHAHDAYLNAVVGTALIKKYPKLESEFVYGDYKVYDVSEQEIGKATAKYFFYSNIMNFFKTEITLANGEIRKRPLIETNGETGEIVWDKGRDFATVRKVLSMPQVNIVKKTEVQTGGFSKESILPKRNSDKLIARKKDWDPKKYGGFDSPTVAYSVLVVAKVEKGKSKKLKSVKELLGITIMERSSFEKNPIDFLEAKGYKEVRKDLIIKLPKYSLFELENGRKRMLASGELQKGNELALPSKYVNFLYLASHYEKLKGSPEDNEQKQLFVEQHKHYLDEIIEQISEFSKRVILADANLDKVLSAYNKHRDKPIREQAENIIHLFTLTNLGAPTAFKYFDTTIDRKRYTSTKEVLDATFIHQSITGLYETRIDLSQLGGD

SEQ ID NO: 33 - protein, 1184 aa, Streptococcus pyogenes
PDNSDVDKLFIQLVQTYNQLFEENINASGVDAKAILSARLSKSRRLENLIAQLPGEKKNGLFGNLIALSLGLTPNFKSNFDLAEDAKLQLSKDTYDDDLDNLLAQIGDQYADLFLAAKNLSDAILLSDILRVNTEITKAPLSASMIKRYDEHHQDLTLLKALVRQQLPEKYKEIFFDQSKNGYAGYIDGGASQEEFYKFIKPILEKMDGTEELLVKLNREDLLRKQRTFDNGSIPHQIHLGELHAILRRQEDFYPFLKDNREKIEKILTFRIPYYVGPLARGNSRFAWMTRKSEETITPWNFEEVVDKGASAQSFIERMTNFDKNLPNEKVLPKHSLLYEYFTVYNELTKVKYVTEGMRKPAFLSGEQKKAIVDLLFKTNRKVTVKQLKEDYFKKIECFDSVEISGVEDRFNASLGTYHDLLKIIKDKDFLDNEENEDILEDIVLTLTLFEDREMIEERLKTYAHLFDDKVMKQLKRRRYTGWGRLSRKLINGIRDKQSGKTILDFLKDGFANRNFMQLIHDDSLTFKEDIQKAQVSGQGDSLHEHIANLAGSPAIKKGILQTVKVVDELVKVMGRHKPENIVIEMARENQTTQKGQKNSRERMKRIEEGIKELGSQILKEHPVENTQLQNEKLYLYYLQNGRDMYVDQELDINRLSDYDVDHIVPQSFLKDDSIDNKVLTRSDKNRGKSDNVPSEEVVKKMKNYWRQLLNAKLITQRKFDNLTKAERGGLSELDKAGFIKRQLVETRQITKHVAQILDSRMNTKYDENDKLIREVKVITLKSKLVSDFRKDFQFYKVREINNYHHAHDAYLNAVVGTALIKKYPKLESEFVYGDYKVYDVSEQEIGKATAKYFFYSNIMNFFKTEITLANGEIRKRPLIETNGETGEIVWDKGRDFATVRKVLSMPQVNIVKKTEVQTGGFSKESILPKRNSDKLIARKKDWDPKKYGGFDSPTVAYSVLVVAKVEKGKSKKLKSVKELLGITIMERSSFEKNPIDFLEAKGYKEVKKDLIIKLPKYSLFELENGRKRMLASGELQKGNELALPSKYVNFLYLASHYEKLKGSPEDNEQKQLFVEQHKHYLDEIIEQISEFSKRVILADANLDKVLSAYNKHRDKPIREQAENIIHLFTLTNLGAPAAFKYFDTTIDRKRYTSTKEVLDATLIHQSITGLYETRIDLSQLGGD

SEQ ID NO: 34 - protein, 1359 aa, Streptococcus pyogenes
MDKKYSIGLDIGTNSVGWAVITDDYKVPSKKFKVLGNTDRHSIKKNLIGALLFDSGETAEATRLKRTARRRYTRRKNRICYLQEIFSNEMAKVDDSFFHRLEESFLVEEDKKHERHPIFGNIVDEVAYHEKYPTIYHLRKKLADSTDKADLRLIYLALAHMIKFRGHFLIEGDLNPDNSDVDKLFIQLVQTYNQLFEENINASRVDAKAILSARLSKSRRLENLIAQLPGEKKNGLFGNLIALSLGLTPNFKSNFDLAEDAKLQLSKDTYDDDLDNLLAQIGDQYADLFLAAKNLSDATLLSDILRVNSEITKAPLSASMIKRYDEHHQDLTLLKALVRQQLPEKYKEIFFDQSKNGYAGYIDGGASQEEFYKFIKPILEKMDGTEELLAKLNREDLLRKQRTFDNGSIPHQIHLGELHAILRRQEDFYPFLKDNREKIEKILTFRIPYYVGPLARGNSRFAWMTRKSEETITPWNFEEVVDKGASAQSFIERMTNFDKNLPNEKVLPKHSLLYEYFTVYNELTKVKYVTEGMRKPAFLSGEQKKAIVDLLFKTNRKVTVKQLKEDYFKKIECFDSVEISGVEDRFNASLGTYHDLLKIIKDKDFLDNEENEDILEDIVLTLTLFEDREMIEERLKTYAHLFDDKVMKQLKRRRYTGWGRLSRKLINGIRDKQSGKTILDFLKDGFANRNFMQLIHDDSLTFKEDIQKAQVSGQGDSLHEHIANLAGSPAIKKGILQTVKVVDELVKVMGRHKPENIVIEMARENQTTQKGQKNSRERMKRIEEGIKELGSDILKEYPVENTQLQNEKLYLYYLQNGRDMYVDQELDINRLSDYDVDHIVPQSFLKDDSIDNKVLTRSDKNRGKSDNVPSEEVVKKMKNYWRQLLNAKLITQRKFDNLTKAERGGLSELDKAGFIKRQLVETRQITKHVAQILDSRMNTKYDENDKLIREVKVITLKSKLVSDFRKDFQFYKVREINNYHHAHDAYLNAVVGTALIKKYPKLESEFVYGDYKVYDVSEQEIGKATAKYFFYSNIMNFFKTEITLANGEIRKRPLIETNGETGEIVWDKGRDFATVRKVLSMPQVNIVKKTEVQTGGFSKESILPKRNSDKLIARKKDWDPKKYGGFDSPTVAYSVLVVAKVEKGKSKKLKSVKELLGITIMERSSFEKNPIDFLEAKGYKEVRKDLIIKLPKYSLFELENGRKRMLASGELQKGNELALPSKYVNFLYLASHYEKLKGSPEDNEQKQLFVEQHKHYLDEIIEQISEFSKRVILADANLDKVLSAYNKHRDKPIREQAENIIHLFTLTNLGAPAAFKYFDTTIDRKRYTSTKEVLDATLIHQSITGLYETRIDLSQLGGD

SEQ ID NO: 35 - protein, 1358 aa, Streptococcus pyogenes
MDKKYSIGLDIGTNSVGWAVITDDYKVPSKKFKVLGNTDRHSIKKNLIGALLFDSGETAEATRLKRTARRRYTRRKNRICYLQEIFSNEMAKVDDSFFHRLEESFLVEEDKKHERHPIFGNIVDEVAYHEKYPTIYHLRKKLADSTDKVDLRLIYLALAHMIKFRGHFLIEGDLNPDNSDVDKLFIQLVQTYNQLFEENINASRVDAKAILSARLSKSRRLENLIAQLPGEKKNGLFGNLIALSLGLTPNFKSNFDLAEDTKLQLSKDTYDDDLDNLLAQIGDQYADLFLAAKNLSDAILLSDILRVNSEITKAPLSASMIKRYDEHHQDLTLLKALVRQQLPEKYKEIFFDQSKNGYAGYIDGGASQEEFYKFIKPILEKMDGTEELLAKLNREDLLRKQRTFDNGSIPYQIHLGELHAILRRQEDFYPFLKDNREKIEKILTFRIPYYVGPLARGNSRFAWMTRKSEETITPWNFEEVVDKGASAQSFIERMTNFDKNLPNEKVLPKHSLLYEYFTVYNELTKVKYVTEGMRKPAFLSGEQKKAIVDLLFKTNRKVTVKQLKEDYFKKIECFDSVEISGVEDRFNTSLGTYHDLLKIIKDKDFLDNEENEDILEDIVLTLTLFEDKEMIEERLKKYANLFDDKVMKQLKRRHYTGWGRLSRKLINGIRDKQSGKTILDFLKDGFANRNFMQLINDDSLTFKEAIQKAQVSGQGHSLHEQIANLAGSPAIKKGILQTVKIVDELVKVMGHKPENIVIEMARENQTTQKGQKNSRERMKRIEEGIKELGSQILKEHPVENTQLQNEKLYLYYLQNGRDMYVDQELDINRLSDYDVDHIVPQSFLKDDSIDNKVLTRSDKNRGKSDNVPSEEVVKKMKNYWRQLLNAKLITQRKFDNLTKAERGGLSELDKAGFIKRQLVETRQITKHVAQILDSRMNTKYDENDKLIREVKVITLKSKLVSDFRKDFQFYKVREINNYHHAHDAYLNAVVGTALIKKYPKLESEFVYGDYKVYDVSEQEIGKATAKYFFYSNIMNFFKTEITLANGEIRKRPLIETNGETGEIVWDKGRDFATVRKVLSMPQVNIVKKTEVQTGGFSKESILPKRNSDKLIARKKDWDPKKYGGFDSPTVAYSVLVVAKVEKGKSKKLKSVKELLGITIMERSSFEKNPIDFLEAKGYKEVRKDLIIKLPKYSLFELENGRKRMLASGELQKGNELALPSKYVNFLYLASHYEKLKGSPEDNEQKQLFVEQHKHYLDEIIEQISEFSKRVILADANLDKVLSAYNKHRDKPIREQAKNIIHLFTLTNLGAPAAFKYFDTTIERNRYKSIKEVLDATLIHQSITGLYETRIDLSQLGGD

SEQ ID NO: 36 - protein, 1359 aa, Streptococcus pyogenes
MDKKYSIGLDIGTNSVGWAVITDDYKVPSKKFKVLGNTDRHSIKKNLIGALLFDSGETAEATRLKRTARRRYTRRKNRICYLQEIFSNEMAKVDDSFFHRLEESFLVEEDKKHERHPIFGNIVDEVAYHEKYPTIYHLRKKLADSTDKADLRLIYLALAHMIKFRGHFLIEGDLNPDNSDVDKLFIQLVQTYNQLFEENINASRVDAKAILSARLSKSRRLENLIAQLPGEKRNGLFGNLIALSLGLTPNFKSNFDLAEDAKLQLSKDTYDDDLDNLLAQIGDQYADLFLAAKNLSDAILLSDILRVNSEITKAPLSASMIKRYDEHHQDLTLLKALVRQQLPEKYKEIFFDQSKNGYAGYIDGGASQEEFYKFIKPILEKMDGTEELLAKLNREDLLRKQRTFDNGSIPHQIHLGELHAILRRQEDFYPFLKDNREKIEKILTFRIPYYVGPLARGNSRFAWMTRKSEETITPWNFEEVVDKGASAQSFIERMTNFDKNLPNEKVLPKHSLLYEYFTVYNELTKVKYVTEGMRKPAFLSGEQKKAIVDLLFKTNRKVTVKQLKEDYFKKIECFDSVEISGVEDRFNASLGTYHDLLKIIKDKDFLDNEENEDILEDIVLTLTLFEDREMIEERLKTYAHLFDDKVMKQLKRRRYTGWGRLSRKLINGIRDKQSGKTILDFLKDGFANRNFMQLIHDDSLTFKEDIQKAQVSGQGDSLHEHIANLAGSPAIKKGILQTVKIVDELVKVMGRHKPENIVIEMARENQTTQKGQKNSRERMKRIEEGIKELGSDILKEYPVENTQLQNEKLYLYYLQNGRDMYVDQELDINRLSDYDVDHIVPQSFLKDDSIDNKVLTRSDKNRGKSDNVPSEEVVKKMKNYWKQLLNAKLITQRKFDNLTKAERGGLSELDKAGFIKRQLVETRQITKHVAQILDSRMNTKYDENDKLIREVKVITLKSKLVSDFRKDFQFYKVREINNYHHAHDAYLNAVVGTALIKKYPKLESEFVYGDYKVYDVSEQEIGKATAKYFFYSNIMNFFKTEITLANGEIRKRPLIETNGETGEIVWDKGRDFATVRKVLSMPQVNIVKKTEVQTGGFSKESILPKRNSDKLIARKKDWDPKKYGGFDSPTVAYSVLVVAKVEKGKSKKLKSVKELLGITIMERSSFEKNPIDFLEAKGYKEVRKDLIIKLPKYSLFELENGRKRMLASGELQKGNELALPSKYVNFLYLASHYEKLKGSPEDNEQKQLFVEQHKHYLDEIIEQISEFSKRVILADANLDKVLSAYNKHRDKPIREQAENIIHLFTLTNLGAPAAFKYFDTTIGRNRYKSIKEVLDATLIHQSITGLYETRIDLSQLGGD

SEQ ID NO: 37 - protein, 1270 aa, Streptococcus pyogenes
MAKVDDSFFHRLEESFLVEEDKKHERHPIFGNIVDEVAYHEKYPTIYHLRKKLVDSTDKADLRLIYLALAHMIKFRGHFLIEGDLNPDNSDVDKLFIQLVQTYNQLFEENINASGVDAKAILSARLSKSRRLENLIAQLPGEKKNGLFGNLIALSLGLTPNFKSNFDLAEDAKLQLSKDTYDDDLDNLLAQIGDQYADLFLAAKNLSDAILLSDILRVNTEITKAPLSASMIKRYDEHHQDLTLLKALVRQQLPEKYKEIFFDQSKNGYAGYIDGGASQEEFYKFIKPILEKMDGTEELLVKLNREDLLRKQRTFDNGSIPHQIHLGELHAILRRQEDFYPFLKDNREKIEKILTFRIPYYVGPLARGNSRFAWMTRKSEETITPWNFEEVVDKGASAQSFIERMTNFDKNLPNEKVLPKHSLLYEYFTVYNELTKVKYVTEGMRKPAFLSGEQKKAIVDLLFKTNRKVTVKQLKEDYFKKIECFDSVEISGVEDRFNASLGTYHDLLKIIKDKDFLDNEENEDILEDIVLTLTLFEDREMIEERLKTYAHLFDDKVMKQLKRRRYTGWGRLSRKLINGIRDKQSGKTILDFLKDGFANRNFMQLIHDDSLTFKEDIQKAQVSGQGDSLHEHIANLAGSPAIKKGILQTVKVVDELVKVMGRHKPENIVIEMARENQTTQKGQKNSRERMKRIEEGIKELGSQILKEHPVENTQLQNEKLYLYYLQNGRDMYVDQELDINRLSDYDVDHIVPQSFLKDDSIDNKVLTRSDKNRGKSDNVPSEEVVKKMKNYWRQLLNAKLITQRKFDNLTKAERGGLSELDKAGFIKRQLVETRQITKHVAQILDSRMNTKYDENDKLIREVKVITLKSKLVSDFRKDFQFYKVREINNYHHAHDAYLNAVVGTALIKKYPKLESEFVYGDYKVYDVSEQEIGKATAKYFFYSNIMNFFKTEITLANGEIRKRPLIETNGETGEIVWDKGRDFATVRKVLSMPQVNIVKKTEVQTGGFSKESILPKRNSDKLIARKKDWDPKKYGGFDSPTVAYSVLVVAKVEKGKSKKLKSVKELLGITIMERSSFEKNPIDFLEAKGYKEVKKDLIIKLPKYSLFELENGRKRMLASGELQKGNELALPSKYVNFLYLASHYEKLKGSPEDNEQKQLFVEQHKHYLDEIIEQISEFSKRVILADANLDKVLSAYNKHRDKPIREQAENIIHLFTLTNLGAPAAFKYFDTTIDRKRYTSTKEVLDATLIHQSITGLYETRIDLSQLGGD

SEQ ID NO: 38 - protein, 536 aa, Streptococcus pyogenes MGAS2111
QELDINRLSGYDVDHIVPQSFLKDDSIDNKVLTRSDKNRGKSDNVPSEEVVKKMKNYWRQLLNAKLITQRKFDNLTKAERGGLSELDKVGFIKRQLVETRQITKHVAQILDSRMNTKYDENDKLIREVRVITLKSKLVSDFRKDFQFYKVREINNYHHAHDAYLNAVVGTALIKKYPKLESEFVYGDYKVYDVSEQEIGKATAKYFFYSNIMNFFKTEITLANGEIRKRPLIETNGETGEIVWDKGRDFATVRKVLSMPQVNIVKKTEVQTGGFSKESILPKRNSDKLIARKKDWDPKKYGGFDSPTVAYSVLVVAKVEKGKSKKLKSVKELLGITIMERSSFEKDPIDFLEAKGYKEVRKDLIIKLPKYSLFELENGRKRMLASGELQKGNELALPSKYVNFLYLASHYEKLKGSPEDNEQKQLFVEQHKHYLDEIIEQISEFSKRVILADANLDKVLSAYNKHRDKPIREQAENIIHLFTLTNLGAPAAFKYFDTTIDRKRYTSTKEVLDATLIHQSITGLYETRIDLSQLGGD

SEQ ID NO: 39 - protein, 305 aa, Streptococcus pyogenes SS1447
IETNGETGEIVWDKGRDFATVRKVLSMPQVNIVKKTEVQTGGFSKESILPKRNSDKLIARKKDWDPKKYGGFDSPTVAYSVLVVAKVEKGKSKKLKSVKELLGITIMERSSFEKDPIDFLEAKGYKEVRKDLIIKLPKYSLFELENGRKRMLASGELQKGNELALPSKYVNFLYLASHYEKLKGSPEDNEQKQLFVEQHKHYLDEIIEQISEFSKRVILADANLDKVLSAYNKHRDKPIREQAENIIHLFTLTNLGAPAAFKYFDTTIDRKRYTSTKEVLDATLIHQSITGLYETRIDLSQLGGD

SEQ ID NO: 40 - protein, 1359 aa, Artificial Sequence
  Synthetic polypeptide
MDKKYSIGLDIGTNSVGWAVITDDYKVPSKKFKVLGNTDRHSIKKNLIGALLFDSGEIAEATRLKRTARRRYTRRKNRICYLQEIFSNEMAKVDDSFFHRLEESFLVEEDKKHERHPIFGNIVDEVAYHEKYPTIYHLRKKLVDSTDKADLRLIYLALAHMIKFRGHFLIEGDLNPDNSDVDKLFIQLVQTYNQLFEENINASGVDAKAILSARLSKSRRLENLIAQLPGEKKNGLFGNLIALSLGLTPNFKSNFDLAEDAKLQLSKDTYDDDLDNLLAQIGDQYADLFLAAKNLSDAILLSDILRLNSEITKAPLSASMIKRYDEHHQDLTLLKALVRQQLPEKYKEIFFDQSKNGYAGYIDGGASQEEFYKFIKPILEKMDGTEELLAKLNREDLLRKQRTFDNGSIPHQIHLGELHAILRRQEDFYPFLKDNREKIEKILTFRIPYYVGPLARGNSRFAWMTRKSEETITPWNFEEVVDKGASAQSFIERMTNFDKNLPNEKVLPKHSLLYEYFTVYNELTKVKYVTEGMRKPAFLSGEQKKAIVDLLFKTNRKVTVKQLKEDYFKKIECFDSVEISGVEDRFNASLGTYHDLLKIIKDKDFLDNEENEDILEDIVLTLTLFEDREMIEERLKTYAHLFDDKVMKQLKRRRYTGWGRLSRKLINGIRDKQSGKTILDFLKDGFANRNFMQLIHDDSLTFKEDIQKAQVSGQGDSLHEHIANLAGSPAIKKGILQTVKVVDELVKVMGRHKPENIVIEMARENQTTQKGQKNSRERMKRIEEGIKELGSQILKEHPVENTQLQNEKLYLYYLQNGRDMYVDQELDINRLSDYDVDHIVPQSFIKDDSIDNKVLTRSDKNRGKSDNVPSEEVVKKMKNYWRQLLNAKLITQRKFDNLTKAERGGLSELDKAGFIKRQLVETRQITKHVAQILDSRMNTKYDENDKLIREVKVITLKSKLVSDFRKDFQFYKVREINNYHHAHDAYLNAVVGTALIKKYPKLESEFVYGDYKVYDVSEQEIGKATAKYFFYSNIMNFFKTEITLANGEIRKRPLIETNGETGEIVWDKGRDFATVRKVLSMPQVNIVKKTEVQTGGFSKESILPKRNSDKLIARKKDWDPKKYGGFDSPTVAYSVLVVAKVEKGKSKKLKSVKELLGITIMERSSFEKNPIDFLEAKGYKEVRKDLIIKLPKYSLFELENGRKRMLASGELQKGNELALPSKYVNFLYLASHYEKLKGSPEDNEQKQLFVEQHKHYLDEIIEQISEFSKRVILADANLDKVLSAYNKHRDKPIREQAENIIHLFTLTNLGAPTAFKYFDTTIDRKRYTSTKEVLDATFIHQSITGLYETRIDLSQLGGD

SEQ ID NO: 41 - protein, 1341 aa, Artificial Sequence
  Synthetic polypeptide
MDQKYSIGLDIGTNSVGWAVVTDDYKVPAKKMKVLGNTDKQSIKKNLLGALLFDSGETAEATRLKRTARRRYTRRRNRLRYLQEIFAEEMNKVDENFFQRLDDSFLVDEDKRGERHPIFGNIAAEVKYHDDFPTIYHLRKHLADISQKADLRLVYLALAHMIKFRGHFLIEGQLKAENTNVQALFKDFVEVYDKTVEESHLSEMTVDALSILTEKVSKSRRLENLIAHYPAEKKNTLFGNLIALSLGLQPNFKTNFQLSEDAKLQFSKDTYEEDLEGLLGEIGDEYADLFASAKNLYDAILLSGILTVDDNSTKAPLSASMVKRYEEHQKDLKKLKDFIKVNAPDQYNAIFKDKNKKGYAGYIENGVKQDEFYKYLKGILLQINGSGDFLDKIDREDFLRKQRTFDNGSIPHQIHLQEMHAILRRQEEHYPFLKENQDKIEKILTFRIPYYVGPLARKGSRFAWAEYKADEKITPWNFDDILDKEKSAEKFITRMTLNDLYLPEEKVLPKHSLLYETFTVYNELTKVKYVNEQGEAKFFDANMKQEIFDHVFKENRKVTKDKLLNYLNKEFEEFRIVNLTGLDKENKAFNSSLGTYHDLRKILDKSFLDDKANEKTIEDIIQTLTLFEDREMIRQRLQKYSDIFTKAQLKKLERRHYTGWGRLSYKLINGIRNKENKKTILDYLIDDGYANRNFMQLINDDALSFKEEIARAQIIGDVDDIANVVHDLPGSPAIKKGILQSVKIVDELVKVMGHNPANIIIEMARENQMTDKGRRNSQQRLKLLQDSLKPVNIKNVENQQLQNDRLFLYYIQNGKDMYTGETLDINNLSQYDIDHIIPQAFIKDNSLDNRVLTRSDKNRGKSDDVPSIEVVHEMKSFWSKLLSVKLITQRKFDNLTKAERGGLTEEDKAGFIKRQLVETRQITKHVAQILDERFNTEFDGNKRRIRNVKIITLKSNLVSNFRKEFELYKVREINDYHHAHDAYLNAVVGNALLLKYPQLEPEFVYGEYPKYNSYRSRKSATEKFLFYSNILRFFKKEDIQTNEDGEIAWNKEKHIKILRKVLSYPQVNIVKKTEEQTGGFSKESILPKGESDKLIPRKTKNSYWNPKKYGGFDSPVVAYSILVFADVEKGKSKKLRKVQDMVGITIMEKKRFEKHPVDFLEQRGYRNVRLEKIIKLPKYSLFELENKRRRLLASARELQKGNELVIPQRFTTLLYHSYQIEKNYEPEHREYVEKHKDEFKELLEYISVFSRKYVLADNNLTKIEMLFSKNKDAEVSSLAKSFISLLTFTAFGAPAAFNFFGENIDRKRYTSVTECLNATLIHQSITGLYETRIDLSKLGED

SEQ ID NO: 42 - protein, 1356 aa, Artificial Sequence
  Synthetic polypeptide
MTKKNYSIGLDIGTNSVGWAVITDDYKVPAKKMKVLGNTDKKYIKKNLLGALLFDSGETAEATRLKRTARRRYTRRKNRLRYLQEIFAEEMTKVDESFFQRLDESFLRWDDDNKKLGRYPIFGNKADVVKYHQEFPTIYHLRKHLADSSEKADLRLVYLALAHMIKFRGHFLIEGELNAENTDVQKIFADFVGVYDRTFDDSHLSEITVDAASILTEKISKSRRLENLIKYYPTEKKNTLFGNLIALALGLQPNFKMNFKLSEDAKLQFSKDSYEEDLGELLGKIGDDYADLFTSAKNLYDAILLSGILIVDDNSTKAPLSASMIKRYVEHQEDLEKLKEFIKANKSELYHDIFKDKNKNGYAGYIENGVKQDEFYKYLKNTLSKIAGSDYFLDKIEREDFLRKQRTFDNGSIPHQIHLQEMHAILRRQGDYYPFLKENQDRIEKILTFRIPYYVGPLARKDSRFSWAEYHSDEKITPWNFDKVIDKEKSAEKFITRMTLNDLYLPEEKVLPKHSHVYETYAVYNELTKIKYVNEQGKDSFFDSNMKQEIFDHVFKENRKVTKEKLLNYLNKEFPEYRIKDLIGLDKENKSFNASLGTYHDLKKILDKAFLDDKVNEEVIEDIIKTLTLFEDKDMIHERLQKYSDIFTADQLKKLERRHYTGWGRLSYKLINGIRNKENNKTILDYLIDDGSANRNFMQLINDDTLPFKQIIQKSQVVGDVDDIEAVVHDLPGSPAIKKGILQSVKIVDELVKVMGDNPDNIVIEMARENQTTNRGRSQSQQRLKKLQNSLKPSYIEDKVENSHLQNDQLFLYYIQNGKDMYTGDELDIDHLSDYDIDHIIPQAFIKDDSIDNRVLTSSAKNRGKSDDVPSLDIVRARKAEWVRLYKSGLISKRKFDNLTKAERGGLTEADKAGFIKRQLVETRQITKHVAQILDARFNTESDENDKVIRDVKVITLKSNLVSQFRKDFEFYKVREINDYHHAHDAYLNAVVGTALLKKYPKLASEFVYGEYKKYDISSDKATAKYFFYSNLMNFFKRVIRYSNGKVIVRPVVEYSKDTEDIAWDKKSNFRTICKVLSYPQVNIVKKVETQTGGFSKESILPKGDSDKLIPRKTKKAYWDTKKYGGFDSPTVAYSVFVVADVEKGKAKKLKTVKELVGISIMERSFFEENPVEFLENKGYHNIREDKLIKLPKYSLFEFEGGKRRLLASASELQKGNEMVIPGHLVKLLYHAQRINSFNSTKYLDYVSAHKKEFEKVLSCVEDFANLYVDVEKNLSKIRAVADSMDNFSIEEISNSFINLLTLTALGAPADFNFLGEKIPRKRYTSTKECLNATLIHQSITGLYETRIDLSKIGEE

SEQ ID NO: 43 - protein, 1365 aa, Streptococcus agalactiae
MNKPYSIGLDIGTNSVGWSIITDDYKVPAKKIRVLGNTDKEYIKKNLIGALLFDGGNTAADRRLKRTARRRYTRRRNRILYLQEIFAEEMSKVDDSFFHRLEDSFLVEEDKRGSKYPIFATLQEEKYYHEKFPTIYHLRKELADKKEKADLRLVYLALAHIIKFRGHFLIEDDRFDVRNTDIQKQYQAFLEIFDTTFENNDLLSQDVDVEAILTDKISKSAKKDRILAQYPNQKSTGIFAEFLKLIVGNQADFKKHFNLEDKTPLQFAKDSYDEDLENLLGQIGDEFADLFSAAKKLYDSVLLSGILTVTDLSTKAPLSASMIQRYDEHREDLKQLKQFVKASLPEKYQEIVADSSKDGYAGYIEGKTNQEAFYKYLSKLLTKQEGSEYFLEKIKNEDFLRKQRTFDNGSIPHQVHLTELRAIIRRQSEYYPFLKENLDRIEKILTFRIPYYVGPLAREKSDFAWMTRKTDDSIRPWNFEDLVDKEKSAEAFIHRMTNNDLYLPEEKVLPKHSLIYEKFTVYNELTKVRFLAEGFKDFQFLNRKQKETIFNSLFKEKRKVTEKDIISFLNKVDGYEGIAIKGIEKQFNASLSTYHDLKKILGKDFLDNTDNELILEDIVQTLTLFEDREMIKKRLDIYKDFFTESQLKKLYRRHYTGWGRLSAKLINGIRNKENQKTILDYLIDDGSANRNFMQLIKDAGLSFKPIIDKARTGSHSDNLKEVIGELAGSPAIKKGILQSLKIVDELVKVMGYEPEQIVVEMARENQTTAKGLSRSRQRLTTLRESLANLKSEKKPKYVKDQVENHHLSDDRLFLYYLQNGKDMYTDDELDIDNLSQYDIDHIIPQAFIKDDSIDNRVLVSSAKNRGKSDDVPSLEIVKDCKVFWKKLLDAKLMSQRKYDNLTKAERGGLTSDDKARFIQRQLVETRQITKHVARILDERFNNELDSKGRRIRKVKIVTLKSNLVSNFRKEFVFYKIREVNNYHHAHDAYLNAVVAKAILTKYPQLEPEFVYGDYPKYNSYKTRKATEKLFFYSNIMNFFKTKVTLADGTVVVKDDIEVNNDTGEIVWDKKKHFATVRKVLSYPQVNIVKKTEIQTGGFSKESILAHGNSDKLIPRKTKDIYLDPKKYGGFDSPIVAYSVLVVADIKKGKAQKLKTVTELLGITIMERSRFEKNPSAFLESKGYLNIRTDKLIILPKYSLFELENGRRRLLASAGELQKGNELALPTQFMKFLYLASRYNESKGKPEEIEKKQEFVNQHVSYFDDIFQIINDFSKRVILADANLEKINRLYQDNKENIPVDELANNIINLFTFTSLGAPAAFKFFDKIVDRKRYTSTKEVLNSTLIHQSITGLYETRIDLGKLGED

SEQ ID NO: 44 - protein, 1365 aa, Streptococcus agalactiae
MNKPYSIGLDIGTNSVGWSIITDDYKVPAKKMRVLGNTDKEYIKKNLIGALLFDGGNTAADRRLKRTARRRYTRRRNRILYLQEIFAEEMSKVDDSFFHRLEDSFLVEEDKRGSKYPIFATLQEEKDYHEKFPTIYHLRKELADKQEKADLRLIYLALAHIIKFRGHFLIEDDRFDVRNTDIQKQYQAFLEIFDTTFENNHLLSQNVDVEAILTDKISKSAKKDRILAQYPNQKSTGIFAEFLKLIVGNQADFKKHFNLEDKTPLQFAKDSYDEDLENLLGQIGDEFADLFSAAKKLYDSVLLSGILTVIDLSTKAPLSASMIQRYDEHREDLKQLKQFVKASLPEKYQEIFADSSKDGYAGYIEGKTNQEAFYKYLSKLLTKQEDSENFLEKIKNEDFLRKQRTFDNGSIPHQVHLTELKAIIRRQSEYYPFLKENQDRIEKILTFRIPYYIGPLAREKSDFAWMTRKTDDSIRPWNFEDLVDKEKSAEAFIHRMTNNDFYLPEEKVLPKHSLIYEKFTVYNELTKVRYKNEQGETYFFDSNIKQEIFDGVFKEHRKVSKKKLLDFLAKEYEEFRIVDVIGLDKENKAFNASLGTYHDLEKILDKDFLDNPDNESILEDIVQTLTLFEDREMIKKRLENYKDLFTESQLKKLYRRHYTGWGRLSAKLINGIRDKESQKTILDYLIDDGRSNRNFMQLINDDGLSFKSIISKAQAGSHSDNLKEVVGELAGSPAIKKGILQSLKIVDELVKVMGYEPEQIVVEMARENQTTNQGRRNSRQRYKLLDDGVKNLASNILKEYPTDNQALQNERLFLYYLQNGRDMYTGEALDIDNLSQYDIDHIIPQAFIKDDSIDNRVLVSSAKNRGKSDDVPSLEIVKDCKVFWKKLLDAKLMSQRKYDNLTKAERGGLTSDDKARFIQRQLVETRQITKHVARILDERFNNELDSKGRRIRKVKIVTLKSNLVSNFRKEFGFYKIREVNDYHHAHDAYLNAVVAKAILTKYPQLEPEFVYGLYRRKKLSKIVRATRKMFFYSNLMNMFKRVVRLADGSIVVRPVIETGRYMGKTAWDKKKHFATVRKVLSYPQVNIVKKTEIQTGGFSKESILAHGNSDKLIPRKTKDIYLDPKKYGGFDSPIVAYSVLVVADIKKGKAQKLKTVTELLGITIMERSKFEKNPSAFLESKGYLNIRDDKLMILPKYSLFELENGRRRLLASAGELQKGNELALPTQFMKFLYLASRYNESKGKPEEIEKKQEFVNQHVSYFDDILQLINDFSKRVILADANLEKINKLYQDNKENISVDELANNIINLFTFTSLGAPAAFKFFDKIVDRKRYTSTKEVLNSTLIHQSITGLYETRIDLSKLGED

SEQ ID NO: 45 - protein, 1365 aa, Streptococcus agalactiae
MNKPYSIGLDIGTNSVGWSIITDDYKVPAKKMRVLGNTDKEYIKKNLIGALLFDGGNTAADRRLKRTARRRYTRRRNRILYLQEIFAEEMSKVDDSFFHRLEDSFLVEEDKRGSKYPIFATLQEEKDYHEKFSTIYHLRKELADKKEKADLRLIYIALAHIIKFRGHFLIEDDSFDVRNTDISKQYQDFLEIFNITFENNDLLSQNVDVEAILTDKISKSAKKDRILAQYPNQKSTGIFAEFLKLIVGNQADFKKYFNLEDKTPLQFAKDSYDEDLENLLGQIGDEFADLFSAAKKLYDSVLLSGILTVIDLSTKAPLSASMIQRYDEHREDLKQLKQFVKASLPEKYQEIFADSSKDGYAGYIEGKTNQEAFYKYLSKLLTKQEDSENFLEKIKNEDFLRKQRTFDNGSIPHQVHLTELKAIIRRQSEYYPFLKENQDRIEKILTFRIPYYIGPLAREKSDFAWMTRKTDDSIRPWNFEDLVDKEKSAEAFIHRMTNNDFYLPEEKVLPKHSLIYEKFTVYNELTKVRYKNEQGETYFFDSNIKQEIFDGVFKEHRKVSKKKLLDFLAKEYEEFRIVDVIGLDKENKAFNASLGTYHDLEKILDKDFLDNPDNESILEDIVQTLTLFEDREMIKKRLENYKDLFTESQLKKLYRRHYTGWGRLSAKLINGIRDKESQKTILDYLIDDGRSNRNFMQLINDDGLSFKSIISKAQAGSHSDNLKEVVGELAGSPAIKKGILQSLKIVDELVKVMGYEPEQIVVEMARENQTTNQGRRNSRQRYKLLDDGVKNLASNILKEYPTDNQALQNERLFLYYLQNGRDMYTGEALDIDNLSQYDIDHIIPQAFIKDDSIDNRVLVSSAKNRGKSDDVPSLEIVKDCKVFWKKLLDAKLMSQRKYDNLTKAERGGLTSDDKARFIQRQLVETRQITKHVARILDERFNNELDSKGRRIRKVKIVTLKSNLVSNFRKEFGFYKIREVNNYHHAHDAYLNAVVAKAILTKYPQLEPEFVYGDYPKYNSYKTRKATEKLFFYSNIMNFFKTKVTLADGTVVVKDDIEVNNDTGEIVWDKKKHFATVRKVLSYPQNNIVKKTEIQTGGFSKESILAHGNSDKLIPRKTKDIYLDPKKYGGFDSPIVAYSVLVVADIKKGKAQKLKTVTELLGITIMERSRFEKNPSAFLESKGYLNIRADKLIILPKYSLFELENGRRRLLASAGELQKGNELALPTQFMKFLYLASRYNESKGKPEEIEKKQEFVNQHVSYFDDILQLINDFSKRVILADANLEKINKLYQDNKENISVDELANNIINLFTFTSLGAPAAFKFFDKIVDRKRYTSTKEVLNSTLIHQSITGLYETRIDLGKLGED

SEQ ID NO: 46 - protein, 1369 aa, Streptococcus agalactiae
MNKPYSIGLDIGTNSVGWSIITDDYKVPAKKMRVLGNTDKEYIKKNLIGALLFDGGNTAADRRLKRTARRRYTRRRNRILYLQEIFAEEMSKVDDSFFHRLEDSFLVEEDKRGSKYPIFATLQEEKDYHEKFSTIYHLRKELADKKEKADLRLIYIALAHIIKFRGHFLIEDDSFDVRNTDISKQYQDFLEIFNTIFENNDLLSQNVDVEAILTDKISKSAKKDRILAQYPNQKSTGIFAEFLKLIVGNQADFKKYFNLEDKTPLQFAKDSYDEDLENLLGQIGDEFADLFSAAKKLYDSVLLSGILTVIDLSTKAPLSASMIQRYDEHREDLKQLKQFVKASLPEKYQEIFADSSKDGYAGYIEGKTNQEAFYKYLSKLLTKQEDSENFLEKIKNEDFLRKQRTFDNGSIPHQVHLTELKAIIRRQSEYYPFLKENQDRIEKILTFRIPYYIGPLAREKSDFAWMTRKTDDSIRPWNFEDLVDKEKSAEAFIHRMTNNDFYLPEEKVLPKHSLIYEKFTVYNELTKVRYKNEQGETYFFDSNIKQEIFDGVFKEHRKVSKKKLLDFLAKEYEEFRIVDVIGLDKENKAFNASLGTYHDLEKILDKDFLDNPDNESILEDIVQTLTLFEDREMIKKRLENYKDLFTESQLKKLYRRHYTGWGRLSAKLINGIRDKESQKTILDYLIDDGRSNRNFMQLINDDGLSFKSIISKAQAGSHSDNLKEVVGELAGSPAIKKGILQSLKIVDELVKVMGYEPEQIVVEMARENQTTNQGRRNSRQRYKLLDDGVKNLASNILKEYPTDNQALQNERLFLYYLQNGRDMYTGEALDIDNLSQYDIDHIIPQAFIKDDSIDNRVLVSSAKNRGKSDDVPSLEIVKDCKVFWKKLLDAKLMSQRKYDNLTKAERGGLTSDDKARFIQRQLVETRQITKHVARILDERFNNELDSKGRRIRKVKIVTLKSNLVSNFRKEFGFYKIREVNNYHHAHDAYLNAVVAKAILTKYPQLEPEFVYGDYPKYNSYKTRKATEKLFFYSNIMNFFKTKVTLADGTVVVKDDIEVNNDTGEIVWDKKKHFATVRKVLSYPQNNIVKKTEIQTGGFSKESILAHGNSDKLIPRKTKDIYLDPKKYGGFDSPIVAYSVLVVADIKKGKAQKLKTVTELLGITIMERSRFEKNPSAFLESKGYLNIRADKLIILPKYSLFELENGRRRLLASAGETIDRLQKGNELALPTQFMKFLYLASRYNESKGKPEEIEKKQEFVNQHVSYFDDILQLINDFSKRVILADANLEKINKLYQDNKENISVDELANNIINLFTFTSLGAPAAFKFFDKIVDRKRYTSTKEVLNSTLIHQSITGLYETRIDLGKLGED

SEQ ID NO: 47 - protein, 1363 aa, Streptococcus agalactiae
MNKPYSIGLDIGTNSVGWSIITDDYKVPAKKMRVLGNTDKEYIKKNLIGALLFDGGNTAADRRLKRTARRRYTRRRNRILYLQEIFAEEMSKVDDSFFHRLEDSFLVEEDKRGSKYPIFATLQEEKDYHEKFSTIYHLRKELADKKEKADLRLIYIALAHIIKFRGHFLIEDDSFDVRNTDISKQYQDFLEIFNTTFENNDLLSQNVDVEAILTDKISKSAKKDRILAQYPNQKSTGIFAEFLKLIVGNQADFKKYFNLEDKTPLQFAKDSYDEDLENLLGQIGDEFADLFSAAKKLYDSVLLSGILTVIDLSTKAPLSASMIQRYDEHREDLKQLKQFVKASLPEKYQEIFADSSKDGYAGYIEGKTNQEAFYKYLSKLLTKQEDSENFLEKIKNEDFLRKQRTFDNGSIPHQVHLTELKAIIRRQSEYYPFLKENQDRIEKILTFRIPYYIGPLAREKSDFAWMTRKTDDSIRPWNFEDLVDKEKSAEAFIHRMTNNDFYLPEEKVLPKHSLIYEKFTVYNELTKVRYKNEQGETYFFDSNIKQEIFDGVFKEHRKVSKKKLLDFLAKEYEEFRIVDVIGLDKENKAFNASLGTYHDLEKILDKDFLDNPDNESILEDIIQTLTLFEDREMIKKRLENYKDLFTESQLKKLYRRHYTGWGRLSAKLINGIRDKESQKTILDYLIDDGRSNRNFMQLINDDGLSFKSIISKAQAGSHSDNLKEVVGELAGSPAIKKGILQSLKIVDELVKVMGYEPEQIVVEMARENQTTNQGRRNSRQRYKLLDDGVKNLASNILKEYPTDNQALQNERLFLYYLQNGRDMYTGEALDIDNLSQYDIDHIIPQAFIKDDSIDNRVLVSSAKNRGKSDDVPSLEIVKDCKVFWKKLLDAKLMSQRKYDNLTKAERGGLTSKARFIQRQLVETRQITKHVARILDERFNNELDSKGRRIRKVKIVTLKSNLVSNFRKEFGFYKIREVNNYHHAHDAYLNAVVAKAILTKYPQLEPEFVYGDYPKYNSYKTRKATEKLFFYSNIMNFFKTKVTLADGTVVVKDDIEVNNDTGEIVWDKKKHFATVRKVLSYPQNNIVKKTEIQTGGFSKESILAHGNSDKLIPRKTKDIYLDPKKYGGFDSPIVAYSVLVVADIKKGKAQKLKTVTELLGITIMERSRFEKNPSAFLESKGYLNIRADKLIILPKYSLFELENGRRRLLASAGELQKGNELALPTQFMKFLYLASRYNESKGKPEEIEKKQEFVNQHVSYFDDILQLINDFSKRVILADANLEKINKLYQDNKENISVDELANNIINLFTFTSLGAPAAFKFFDKIVDRKRYTSTKEVLNSTLIHQSITGLYETRIDLGKLGED

SEQ ID NO: 48 - protein, 1365 aa, Streptococcus agalactiae
MNKPYSIGLDIGTNSVGWSIITDDYKVPAKKMRVLGNTDKEYIKKNLIGALLFDGGNTAADRRLKRTARRRYTRRRNRILYLQEIFAEEMSKVDDSFFHRLEDSFLVEEDKRGSKYPIFATLQEEKDYHEKFSTIYHLRKELADKKEKADLRLIYIALAHIIKFRGHFLIEDDSFDVRNTDISKQYQDFLEIFNTTFENNDLLSQNVDVEAILTDKISKSAKKDRILAQYPNQKSTGIFAEFLKLIVGNQADFKKYFNLEDKTPLQFAKDSYDEDLENLLGQIGDEFADLFSAAKKLYDSVLLSGILTVIDLSTKAPLSASMIQRYDEHREDLKQLKQFVKASLPEKYQEIFADSSKDGYAGYIEGKTNQEAFYKYLSKLLTKQEDSENFLEKIKNEDFLRKQRTFDNGSIPHQVHLTELKAIIRRQSEYYPFLKENQDRIEKILTFRIPYYIGPLAREKSDFAWMTRKTDDSIRPWNFEDLVDKEKSAEAFIHRMTNNDFYLPEEKVLPKHSLIYEKFTVYNELTKVRYKNEQGETYFFDSNIKQEIFDGVFKEHRKVSKKKLLDFLAKEYEEFRIVDVIGLDKENKAFNASLGTYHDLEKILDKDFLDNPDNESILEDIVQTLTLFEDREMIKKRLENYKDLFTESQLKKLYRRHYTGWGRLSAKLINGIRDKESQKTILDYLIDDGRSNRNFMQLINDDGLSFKSIISKAQAGSHSDNLKEVVGELAGSPAIKKGILQSLKIVDELVKVMGYEPEQIVVEMARENQTTNQGRRNSRQRYKLLDDGVKNLASNILKEYPTDNQALQNERLFLYYLQNGRDMYTGEALDIDDLSQYDIDHIIPQAFIKDDSIDNRVLVSSAKNRGKSDDVPSLEIVKDCKVFWKKLLDAKLMSQRKYDNLTKAERGGLTSDDKARFIQRQLVETRQITKHVARILDERFNNELDSKGRRIRKVKIVTLKSNLVSNFRKEFGFYKIREVNNYHHAHDAYLNAVVAKAILTKYPQLEPEFVYGDYPKYNSYKTRKATEKLFFYSNIMNFFKTKVTLADGTVVVKDDIEVNNDTGEIVWDKKKHFATVRKVLSYPQNNIVKKTEIQTGGFSKESILAHGNSDKLIPRKTKDIYLDPKKYGGFDSPIVAYSVLVVADIKKGKAQKLKTVTELLGITIMERSRFEKNPSAFLESKGYLNIRADKLIILPKYSLFELENGRRRLLASAGELQKGNELALPTQFMKFLYLASRYNESKGKPEEIEKKQEFVNQHVSYFDDILQLINDFSKRVILADANLEKINKLYQDNKENISVDELANNIINLFTFTSLGAPAAFKFFDKIVDRKRYTSTKEVLNSTLIHQSITGLYETRIDLGKLGED

SEQ ID NO: 49 - protein, 1365 aa, Streptococcus agalactiae
MNKPYSIGLDIGTNSVGWSIITDDYKVPAKKMRVLGNTDKEYIKKNLIGALLFDGGNTAADRRLKRTARRRYTRRRNRILYLQEIFAEEMSKVDDSFFHRLEDSFLVEEDKRGSKYPIFATLQEEKDYHEKFSTIYHLRKELADKKEKADLRLIYIALAHIIKFRGHFLIEDDSFDVRNTDISKQYQDFLEIFNTTFENNDLLSQNVDVEAILTDKISKSAKKDRILAQYPNQKSTGIFAEFLKLIVGNQADFKKYFNLEDKTPLQFAKDSYDEDLENLLGQIGDEFADLFSAAKKLYDSVLLSGILTVIDLSTKAPLSASMIQRYDEHREDLKQLKQFVKASLPEKYQEIFADSSKDGYAGYIEGKTNQEAFYKYLSKLLTKQEDSENFLEKIKNEDFLRKQRTFDNGSIPHQVHLTELKAIIRRQSEYYPFLKENQDRIEKILTFRIPYYIGPLAREKSDFAWMTRKTDDSIRPWNFEDLVDKEKSAEAFIHRMTNNDFYLPEEKVLPKHSLIYEKFTVYNELTKVRYKNEQGETYFFDSNIKQEIFDGVFKEHRKVSKKKLLDFLAKEYEEFRIVDVIGLDKENKAFNASLGTYHDLEKILDKDFLDNPDNESILEDIVQTLTLFEDREMIKKRLENYKDLFTESQLKKLYRRHYTGWGRLSAKLINGIRDKESQKTILDYLIDDGRSNRNFMQLINDDGLSFKSIISKAQAGSHSDNLKEVVGELAGSPAIKKGILQSLKIVDELVKVMGYEPEQIVVEMARENQTTNQGRRNSRQRYKLLDDGVKNLASNILKEYPTDNQALQNERLFLYYLQNGRDMYTGEALDIDNLSQYDIDHIIPQAFIKDDSIDNRVLVSSAKNRGKSDDVPSLEIVKDCKVFWKKLLDAKLMSQRKYDNLTKAERGGLTSDDKARFIQRQLVETRQITKHVARILDERFNNELDSKGRRIRKVKIVTLKSNLVSNFRKEFGFYKIREVNNYHHAHDAYLNAVVAKAILTKYPQLEPEFVYGDYPKYNSYKTRKATEKLFFYSNIMNFFKTKVTLADGTVVVKDDIEVNNDTGEIVWDKKKHFATVRKVLSYPQNNIVKKTEIQTGGFSKESILAHGNSDKLIPRKTKDIYLDPKKYGGFDSPIVAYSVLVVADIKKGKAQKLKTVTELLGITIMERSRFEKNPSAFLESKGYLNIRADKLIILPKYSLFELENGRRRLLASAGELQKGNELALPTQFMKFLYLASRYNESKGKPEEIEKKQEFVNQHVSYFDDILQLINDFSKRVILADANLEKINKLYQDNKENISVDELANNIINLFTFTSLGAPAAFKFFDKIVDRKRYTSTKEVLNSTLIHQSITGLYETRIDLGKLGED

SEQ ID NO: 50 - protein, 1365 aa, Streptococcus agalactiae
MNKPYSIGLDIGTNSVGWSIITDDYKVPAKKMRVLGNTDKEYIKKNLIGALLFDGGNTAADRRLKRTARRRYTRRRNRILYLQEIFAEEMSKVDDSFFHRLEDSFLVEEDKRGSKYPIFATLQEEKDYHEKFSTIYHLRKELADKKEKADLRLIYIALAHIIKFRGHFLIEDDSFDVRNTDISKQYQDFLEIFNTTFENNDLLSQNVDVEAILTDKISKSAKKDRILAQYPNQKSTGIFAEFLKLIVGNQADFKKYFNLEDKTPLQFAKDSYDEDLENLLGQIGDEFADLFSAAKKLYDSVLLSGILTVIDLSTKAPLSASMIQRYDEHREDLKQLKQFVKASLPEKYQEIFADSSKDGYAGYIEGKTNQEAFYKYLSKLLTKQEDSENFLEKIKNEDFLRKQRTFDNGSIPHQVHLTELKAIIRRQSEYYPFLKENQDRIEKILTFRIPYYIGPLAREKSDFAWMTRKTDDSIRPWNFEDLVDKEKSAEAFIHRMTNNDFYLPEEKVLPKHSLIYEKFTVYNELTKVRYKNEQGETYFFDSNIKQEIFDGVFKEHRKVSKKKLLDFLAKEYEEFRIVDVIGLDKENKAFNASLGTYHDLEKILDKDFLDNPDNESILEDIVQTLTLFEDREMIKKRLENYKDLFTESQLKKLYRRHYTGWGRLSAKLINGIRDKESQKTILDYLIDDGRSNRNFMQLINDDGLSFKSIISKAQAGSHSDNLKEVVGELAGSPAIKKGILQSLKIVDELVKVMGYEPEQIVVEMARENQTTNQGRRNSRQRYKLLDDGVKNLASNILKEYPTDNQALQNERLFLYYLQNGRDMYTGEALDIDNLSQYDIDHIIPQAFIKDDSIDNRVLVSSAKNRGKSDDVPSLEIVKDCKVFWKKLLDAKLMSQRKYDNLTKAERGGLTSDDKARFIQRQLVETRQITKHVARILDERFNNELDSKGRRIRKVKIVTLKSNLVSNFRKEFGFYKIREVNNYHHAHDAYLNAVVAKAILTKYPQLEPEFVYGDYPKYNSYKTRKATEKLFFYSNIMNFFKTKVTLADGTVVVKDDIEVNNDTGEIVWDKKKHFATVRKVLSYPQNNIVKKTEIQTGGFSKESILAHGNSDKLIPRKTKDIYLDPKKYGGFDSPIVAYSVLVVADIKKGKAQKLKTVTELLGITIMERSRFEKNPSAFLESKGYLNIRADKLIILPKYSLFELENGRRRLLASAGELQKGNELALPTQFMKFLYLASRYNESKGKPEEIEKKQEFVNQHVSYFDDILQLINDFSKRVILADANLEKINKLYQDNKENISVDELANNIINLFTFTSLGAPAAFKFFDKIVDRKRYTSTKEVLNSTLIHQSITGLYETRIDLGKLGGD

SEQ ID NO: 51 - protein, 1365 aa, Streptococcus agalactiae
MNKPYSIGLDIGTNSVGWSIITDDYKVPAKKMRVLGNTDKEYIKKNLIGALLFDGGNTAADRRLKRTARRRYTRRRNRILYLQEIFAEEMSKVDDSFFHRLEDSFLVEEDKRGSKYPIFATLQEEKDYHEKFSTIYHLRKELADKKEKADLRLIYIALAHIIKFRGHFLIEDDSFDVRNTDISKQYQDFLEIFNTTFENNDLLSQNVDVEAILTDKISKSAKKDRILAQYPNQKSTGIFAEFLKLIVGNQADFKKYFNLEDKTPLQFAKDSYDEDLENLLGQIGDEFADLFSAAKKLYDSVLLSGILTVIDLSTKAPLSASMIQRYDEHREDLKQLKQFVKASLPEKYQEIFADSSKDGYAGYIEGKTNQEAFYKYLSKLLTKQEDSENFLEKIKNEDFLRKQRTFDNGSIPHQVHLTELKAIIRRQSEYYPFLKENQDRIEKILTFRIPYYIGPLAREKSDFAWMTRKTDDSIRPWNFEDLVDKEKSAEAFIHRMTNNDFYLPEEKVLPKHSLIYEKFTVYNELTKVRYKNEQGETYFFDSNIKQEIFDGVFKEHRKVSKKKLLDFLAKEYEEFRIVDVIGLDKENKAFNASLGTYHDLEKILDKDFLDNPDNESILEDIVQTLTLFEDREMIKKRLENYKDLFTESQLKKLYRRHYTGWGRLSAKLINGIRDKESQKTILDYLIDDGRSNRNFMQLINDDGLSFKSIISKAQAGSHSDNLKEVVGELAGSPAIKKGILQSLKIVDELVKVMGYEPEQIVVEMARENQTTNQGRRNSRQRYKLLDDGVKNLASNILKEYPTDNQALQNERLFLYYLQNGRDMYTGEALDIDNLSQYDIDHIIPQAFIKDDSIDNRVLVSSAKNRGKSDDVPSLEIVKDCKVFWKKLLDAKLMSQRKYDNLTKAERGGLTSDDKARFIQRQLVETRQITKHVARILDERFNNELDSKGRRIRKVKIVTLKSNLVSNFRKEFGFYKIREVNNYHHAHDAYLNAVVAKAILTKYPQLEPEFVYGDYPKYNSYKTRKATEKLFFYSNIMNFFKTKVTLADGTVVVKDDIEVNNDTGEIVWDKKKHFATVRKVLSYPQNNIVKKTEIQTGGFSKESILAHGNSDKLIPRKTKDIYLDPKKYGGFDSPIVAYSVLVVADIKKGKAQKLKTVTELLGITIMERSRFEKNPSAFLESKGYLNIRDDKLMILPKYSLFELENGRRRLLASAGELQKGNELALPTQFMKFLYLASRYNESKGKPEEIEKKQEFVNQHVSYFDDILQLINDFSKRVILADANLEKINKLYQDNKENISVDELANNIINLFTFTSLGAPAAFKFFDKIVDRKRYTSTKEVLNSTLIHQSITGLYETRIDLGKLGED

SEQ ID NO: 52 - protein, 1365 aa, Streptococcus agalactiae
MNKPYSIGLDIGTNSVGWSIITDDYKVPAKKMRVLGNTDKEYIKKNLIGALLFDGGNTAADRRLKRTARRRYTRRRNRILYLQEIFAEEMSKVDDSFFHRLEDSFLVEEDKRGSKYPIFATLQEEKDYHEKFSTIYHLRKELADKKEKADLRLIYIALAHIIKFRGHFLIEDDSFDVRNTDISKQYQDFLEIFNTTFENNDLLSQNVDVEAILTDKISKSAKKDRILAQYPNQKSTGIFAEFLKLIVGNQADFKKYFNLEDKTPLQFAKDSYDEDLENLLGQIGDEFADLFSAAKKLYDSVLLSGILTVIDLSTKAPLSASMIQRYDEHREDLKQLKQFVKASLPEKYQEIFADSSKDGYAGYIEGKTNQEAFYKYLSKLLTKQEDSENFLEKIKNEDFLRKQRTFDNGSIPHQVHLTELKAIIRRQSEYYPFLKENQDRIEKILTFRIPYYIGPLAREKSDFAWMTRKTDDSIRPWNFEDLVDKEKSAEAFIHRMTNNDFYLPEEKVLPKHSLIYEKFTVYNELTKVRYKNEQGETYFFDSNIKQEIFDGVFKEHRKVSKKKLLDFLAKEYEEFRIVDVIGLDKENKAFNASLGTYHDLEKILDKDFLDNPDNESILEDIVQTLTLFEDREMIKKRLENYKDLFTESQLKKLYRRHYTGWGRLSAKLINGIRDKESQKTILDYLIDDGRSNRNFMQLINDDGLSFKSIISKAQAGSHSDNLKEVVGELAGSPAIKKGILQSLKIVDELVKVVGYEPEQIVVEMARENQTTNQGRRNSRQRYKLLDDGVKNLASNILKEYPTDNQALQNERLFLYYLQNGRDMYTGEALDIDNLSQYDIDHIIPQAFIKDDSIDNRVLVSSAKNRGKSDDVPSLEIVKDCKVFWKKLLDAKLMSQRKYDNLTKAERGGLTSDDKARFIQRQLVETRQITKHVARILDERFNNELDSKGRRIRKVKIVTLKSNLVSNFRKEFGFYKIREVNNYHHAHDAYLNAVVAKAILTKYPQLEPEFVYGDYPKYNSYKTRKATEKLFFYSNIMNFFKTKVTLADGTVVVKDDIEVNNDTGEIVWDKKKHFATVRKVLSYPQNNIVKKTEIQTGGFSKESILAHGNSDKLIPRKTKDIYLDPKKYGGFDSPIVAYSVLVVADIKKGKAQKLKTVTELLGITIMERSRFEKNPSAFLESKGYLNIRADKLIILPKYSLFELENGRRRLLASAGELQKGNELALPTQFMKFLYLASRYNESKGKPEEIEKKQEFVNQHVSYFDDILQLINDFSKRVILADANLEKINKLYQDNKENISVDELANNIINLFTFTSLGAPAAFKFFDKIVDRKRYTSTKEVLNSTLIHQSITGLYETRIDLGKLGED

SEQ ID NO: 53 - protein, 1365 aa, Streptococcus agalactiae
MNKPYSIGLDIGTNSVGWSIITDDYKVPAKKMRVLGNTDKEYIKKNLIGALLFDGGNTAADRRLKRTARRRYTRRRNRILYLQEIFAEEMSKVDDSFFHRLEDSFLVEEDKRGSKYPIFATLQEEKDYHEKFSTIYHLRKELADKKEKADLRLIYIALAHIIKFRGHFLIEDDSFDVRNTDISKQYQDFLEIFNTTFENNDLLSQNVDVEAILTDKISKSAKKDRILAQYPNQKSTGIFAEFLKLIVGNQADFKKYFNLEDKTPLQFAKDSYDEDLENLLRQIGDEFADLFSAAKKLYDSVLLSGILTVIDLSTKAPLSASMIQRYDEHREDLKQLKQFVKASLPEKYQEIFADSSKDGYAGYIEGKTNQEAFYKYLSKLLTKQEDSENFLEKIKNEDFLRKQRTFDNGSIPHQVHLTELKAIIRRQSEYYPFLKENQDRIEKILTFRIPYYIGPLAREKSDFAWMTRKTDDSIRPWNFEDLVDKEKSAEAFIHRMTNNDFYLPEEKVLPKHSLIYEKFTVYNELTKVRYKNEQGETYFFDSNIKQEIFDGVFKEHRKVSKKKLLDFLAKEYEEFRIVDVIGLDKENKAFNASLGTYHDLEKILDKDFLDNPDNESILEDIVQTLTLFEDREMIKKRLENYKDLFTESQLKKLYRRHYTGWGRLSAKLINGIRDKESQKTILDYLIDDGRSNRNFMQLINDDGLSFKSIISKAQAGSHSDNLKEVVGELAGSPAIKKGILQSLKIVDELVKVMGYEPEQIVVEMARENQTTNQGRRNSRQRYKLLDDGVKNLASNILKEYPTDNQALQNERLFLYYLQNGRDMYTGEALDIDNLSQYDIDHIIPQAFIKDDSIDNRVLVSSAKNRGKSDDVPSLEIVKDCKVFWKKLLDAKLMSQRKYDNLTKAERGGLTSDDKARFIQRQLVETRQITKHVARILDERFNNELDSKGRRIRKVKIVTLKSNLVSNFRKEFGFYKIREVNNYHHAHDAYLNAVVAKAILTKYPQLEPEFVYGDYPKYNSYKTRKATEKLFFYSNIMNFFKTKVTLADGTVVVKDDIEVNNDTGEIVWDKKKHFATVRKVLSYPQNNIVKKTEIQTGGFSKESILAHGNSDKLIPRKTKDIYLDPKKYGGFDSPIVAYSVLVVADIKKGKAQKLKTVTELLGITIMERSRFEKNPSAFLESKGYLNIRADKLIILPKYSLFELENGRRRLLASAGELQKGNELALPTQFMKFLYLASRYNESKGKPEEIEKKQEFVNQHVSYFDDILQLINDFSKRVILADANLEKINKLYQDNKENISVDELANNIINLFTFTSLGAPAAFKFFDKIVDRKRYTSTKEVLNSTLIHQSITGLYETRIDLGKLGED

SEQ ID NO: 54 - protein, 1365 aa, Streptococcus agalactiae
MNKPYSIGLDIGTNSVGWSIITDDYKVPAKKMRVLGNTDKEYIKKNLIGALLFDGGNTAADRRLKRTARRRYTRRRNRILYLQEIFAEEMSKVDDSFFHRLEDSFLVEEDKRGSKYPIFATMQEEKDYHEKFPTIYHLRKELADKKEKADLRLVYLALAHIIKFRGHFLIEDDRFDVRNTDIQKQYQAFLEIFDTSFENNHLLSQNVDVEAILTDKISKSAKKDRILAQYPNQKSTGIFAEFLKLIVGNQADFKKHFNLEDKTPLQFAKDSYDEDLENLLGQIGDEFADLFSAAKKLYDSVLLSGILTVTDLSTKAPLSAYMIQRYDEHREDLKQLKQFVKASLPEKYQEIFADSSKDGYAGYIEGKTNQEAFYKYLSKLLTKQEDSEYFLEKIKNEDFLRKQRTFDNGSIPHQVHLTELKAIIRRQSEYYPFLKENQDKIEKILTFRIPYYVGPLARGNSDFAWMTRKTDDSIRPWNFEDLVDKEKSAEAFIHRMTNNDLYLPEEKVLPKHSLIYEKFTVYNELTKVRYKNEQGETYFFDSNVKQEIFDGVFKEHRKVSKKQLLDFLAKEFEEFRIVDVTGLDKENKAFNASLGTYHDLKKILDKDFLDNPDNESILEDIVQTITLFEDREMIKKRLENYKDLFTESQLKKLYRRHYTGWGRLSAKLINGIRDRESQKTILDYLISDGRANRNFMQLINDDGLSFKSIISKAQSGSHSDNLKEVVGELAGSPAIKKGILQSLKIVDELVKVMGYEPEQIVVEMARENQTTNQGRRNSRQRYKLLEDGVKNLASDILKEYPTDNQALQNERLFLYYLQNGRDMYTGEALDIDNLSQYDIDHIVPQAFIKDDSIDNRVLVSSAKNRGKSDDVPSIDIVKARKAFWKKLLDAKLISQRKYDNLTKAERGGLTPDDKAGFIQRQLVETRQITKHVARILDERFNNKVDDNNKPIRKVKIVTLKSNLVSNFRKEFGFYKIREVNNYHHAHDAYLNAVVAKAILTKYPQLEPEFVYGDYPKYNSYKTRKATEKLFFYSNIMNFFKTKVTLADETVVVKDDIEVNNETGEIAWDKKKHFATVRKVLSYPQVNIVKKTEVQTGGFSKESILAHSNSDKLIPRKTKDIYLDPKKYGGFDSPIVAYSVLVLADIKKGKAQKLKTVKELIGITIMERERFEKNPSAFLESKGYLNIRTDKLIILPKYSLFELENGRRRLLASAGELQKGNELALPTQYMKFLYLASRYNESKGKPEEIEKKQEFVNQHISYFDDILQLINDFSKRVILADANLEKINKLYSDNKDNTPVDELAKNIINLFTFTSLGAPAAFKFFDKSVDRKRYTSTKEVLDSTLIHQSITGLYETRIDLGKLGED

SEQ ID NO: 55 - protein, 1365 aa, Streptococcus agalactiae
MNKPYSIGLDIGTNSVGWSIITDDYKVPAKKMRVLGNTDKEYIKKNLIGALLFDGGNTAADRRLKRTARRRYTRRRNRILYLQEIFAEEMSKVDDSFFHRLEDSFLVEEDKRGSKYPIFATMQEEKYYHEKFPTIYHLRKELADKKEKADLRLIYLALAHIIKFRGHFLIEDDRFDVRNTDIQKQYQAFLEIFDTTFENNDLLSQNVDVEAILTDKISKSAKKDRILARYPNQKSTGIFAEFLKLIVGNQADFKKHFNLEDKTPLQFAKDSYDEDLENLLGQIGDEFADLFSAAKKLYDSVLLSGILTVTDLSTKAPLSASMIQHYDEHREDLKQLKQFVKASLPEKYQEIFADSSKDGYAGYIEGKTNQEAFYKYLSKLLTKQEGSEYLLEKIKNEDFLRKQRTFDNGSIPHQVHLTELRAIIRRQSEYYPFLKENLDRIEKILTFRIPYYVGPLAREKSDFAWMTRKTDDSIRPWNFEDLVDKEKSAEAFIHRMTNNDLYLPEEKVLPKHSLIYEKFTVYNELTKVRFLAEGFKDFQFLNRKQKETIFNSLFKEKRKVTEKDIISFLNKVDGYEGIAIKGIEKQFNASLSTYHDLKKILGKDFLDNTDNELILEDIVQTLTLFEDREMIRKRLDIYKDFFTESQLKKLYRRHYTGWGRLSAKLINGIRNKENQKTILDYLIDDGSANRNFMQLIKDAGLSFKPIIDKARTGSHSDNLKEVVGELAGSPAIKKGILQSLKIVDELVKVMGYEPEQIVVEMARENQTTAKGLSRSRQRLTTLRESLANLKSEKKPKYVKDQVENHHLSDDRLFLYYLQNGKDMYTDDELDIDNLSQYDIDHIIPQAFIKDDSIDNRVLVSSAKNRGKSDDVPSVEIVKDCKVFWKKLLDAKLMSQRKYDNLTKAERGGLTSDDKARFIQRQLVETRQITKHVARILDERFNNELDSKGRRIRKVKIVTLKSNLVSNFRKEFGFYKIREVNNYHHAHDAYLNAVVAKAILTKYPQLEPEFVYGDYPKYNSYKTRKATEKLFFYSNIMNFFKTKVTLADGTVVVKDDIEVNNDTGEIVWDKKKHFATVRKVLSYPQVNIVKKTEIQTGGFSKESILAHGNSDKLIPRKTKDIYLDPKKYGGFDSPIVAYSVLVVADIKKGKAQKLKTVTELLGITIMERSRFEKNPSAFLESKGYLNIRDDKLMILPKYSLFELENGRRRLLASAGELQKGNELALPTQFMKFLYLASRYNELKGKPEEIEQKQEFVVQHVSYFDDILQIINDFSNRVILADANLEKINKLYQDNKENIPVDELANNIINLFTFTSLGAPAAFKFFDKIVDRKRYTSTKEVLNSTLIHQSITGLYETRIDLGKLGED

SEQ ID NO: 56 - protein, 1365 aa, Streptococcus agalactiae
MNKPYSIGLDIGTNSVGWSIITDDYKVPAKKMRVLGNTDKEYIKKNLIGALLFDGGNTAADRRLKRTARRRYTRRRNRILYLQEIFAEEMSKVDDSFFHRLEDSFLVEEDKRGSKYPIFATMQEEKYYHEKFPTIYHLRKELADKKEKADLRLIYLALAHIIKFRGHFLIEDDRFDVRNTDIQKQYQAFLEIFDTTFENNDLLSQNVDVEAILTDKISKSAKKDRILARYPNQKSTGIFAEFLKLIVGNQADFKKHFNLEDKTPLQFAKDSYDEDLENLLGQIGDEFADLFSAAKKLYDSVLLSGILTVTDLSTKAPLSASMIQRYDEHREDLKQLKQFVKASLPEKYQEIFADSSKDGYAGYIEGKTNQEAFYKYLSKLLTKQEGSEYLLEKIKNEDFLRKQRTFDNGSIPHQVHLTELRAIIRRQSEYYPFLKENLDRIEKILTFRIPYYVGPLAREKSDFAWMTRKTDDSIRPWNFEDLVDKEKSAEAFIHRMTNNDLYLPEEKVLPKHSLIYEKFTVYNELTKVRFLAEGFKDFQFLNRKQKETIFNSLFKEKRKVTEKDIISFLNKVDGYEGIAIKGIEKQFNASLSTYHDLKKILGKDFLDNTDNELILEDIVQTLTLFEDREMIRKRLDIYKDFFTESQLKKLYRRHYTGWERLSAKLINGIRNKENQKTILDYLIDDGSANRNFMQLIKDAGLSFKPIIDKARTGSHLDNLKEVVGELAGSPAIKKGILQSLKIVDELVKVMGYEPEQIVVEMARENQTTAKGLSRSRQRLTTLRESLANLKSEKKPKYVKDQVENHHLSDDRLFLYYLQNGKDMYTDDELDIDNLSQYDIDHIIPQAFIKDDSIDNRVLVSSAKNRGKSDDVPSLEIVKDCKVFWKKLLDAKLMSQRKYDNLTKAERGGLTSDDKARFIQRQLVETRQITKHVARILDERFNNELDSKGRRIRKVKIVTLKSNLVSNFRKEFGFYKIREVNNYHHAHDAYLNAVVAKAILTKYPQLEPEFVYGDYPKYNSYKTRKATEKLFFYSNIMNFFKTKVTLADGTVVVKDDIEVNNDTGEIVWDKKKHFATVRKVLSYPQVNIVKKTEVQTGGFSKESILAHGNSDKLIPRKTKDIYLDPKKYGGFDSPIVAYSVLVVADIKKGKAQKLKTVTELLGITIMERSRFEKNPSAFLESKGYLNIRTDKLIILPKYSLFELENGRRRLLASAGELQKGNELALPTQYMKFLYLASRYNELKGKPEEIEQKQEFVVQHVSYFDDILQIINDFSNRVILADANLEKINKLYQDNKENIPVDELANNIINLFTFTSLGAPAAFKFFDKIVDRKRYTSTKEVLNSTLIHQSITGLYETRIDLGKLGEG

SEQ ID NO: 57 - protein, 1365 aa, Streptococcus agalactiae
MNKPYSIGLDIGTNSVGWSIITDDYKVPAKKMRVLGNTDKEYIKKNLIGALLFDGGNTAADRRLKRTARRRYTRRRNRILYLQEIFAEEMSKVDDSFFHRLEDSFLVEEDKRGSKYPIFATMQEEKYYHEKFPTIYHLRKELADKKEKADLRLIYLALAHIIKFRGHFLIEDDRFDVRNTDIQKQYQAFLEIFDTTFENNDLLSQNVDVEAILTDKISKSAKKDRILARYPNQKSTGIFAEFLKLIVGNQADFKKHFNLEDKTPLQFAKDSYDEDLENLLGQIGDEFADLFSAAKKLYDSVLLSGILTVTDLSTKAPLSASMIQRYDEHREDLKQLKQFVKASLPEKYQEIFADSSKDGYAGYIEGKTNQEAFYKYLSKLLTKQEGSEYLLEKIKNEDFLRKQRTFDNGSIPHQVHLTELRAIIRRQSEYYPFLKENLDRIEKILTFRIPYYVGPLAREKSDFAWMTRKTDDSIRPWNFEDLVDKEKSAEAFIHRMTNNDLYLPEEKVLPKHSLIYEKFTVYNELTKVRFLAEGFKDFQFLNRKQKETIFNSLFKEKRKVTEKDIISFLNKVDGYEGIAIKGIEKQFNASLSTYHDLKKILGKDFLDNTDNELILEDIVQTLTLFEDREMIRKRLDIYKDFFTESQLKKLYRRHYTGWGRLSAKLINGIRNKENQKTILDYLIDDGSANRNFMQLIKDAGLSFKPIIDKARTGSHLDNLKEVVGELAGSPAIKKGILQSLKIVDELVKVMGYEPEQIVVEMARENQTTAKGLSRSRQRLTTLRESLANLKSEKKPKYVKDQVENHHLSDDRLFLYYLQNGKDMYTDDELDIDNLSQYDIDHIIPQAFIKDDSIDNRVLVSSAKNRGKSDDVPSLEIVKDCKVFWKKLLDAKLMSQRKYDNLTKAERGGLTSDDKARFIQRQLVETRQITKHVARILDERFNNELDSKGRRIRKVKIVTLKSNLVSNFRKEFGFYKIREVNNYHHAHDAYLNAVVAKAILTKYPQLEPEFVYGDYPKYNSYKTRKATEKLFFYSNIMNFFKTKVTLADGTVVVKDDIEVNNDTGEIVWDKKKHFATVRKVLSYPQVNIVKKTEVQTGGFSKESILAHGNSDKLIPRKTKDIYLDPKKYGGFDSPIVAYSVLVVADIKKGKAQKLKTVTELLGITIMERSRFEKNPSAFLESKGYLNIRTDKLIILPKYSLFELENGRRRLLASAGELQKGNELALPTQYMKFLYLASRYNELKGKPEEIEQKQEFVVQHVSYFDDILQIINDFSNRVILADANLEKINKLYQDNKENIPVDELANNIINLFTFTSLGAPAAFKFFDKIVDRKRYTSTKEVLNSTLIHQSITGLYETRIDLGKLGEG

SEQ ID NO: 58 - protein, 1365 aa, Streptococcus agalactiae
MNKPYSIGLDIGTNSVGWSIITDDYKVPAKKMRVLGNTDKEYIKKNLIGALLFDGGNTAADRRLKRTARRRYTRRRNRILYLQEIFAEEMSKVDDSFFHRLEDSFLVEEDKRGSKYPIFATMQEEKYYHEKFPTIYHLRKELADKKEKADLRLIYLALAHIIKFRGHFLIEDDRFDVRNTDIQKQYQAFLEIFDTTFENNDLLSQNVDVEAILTDKISKSAKKDRILARYPNQKSTGIFAEFLKLIVGNQADFKKHFNLEDKTPLQFAKDSYDEDLENLLGQIGDEFADLFSAAKKLYDSVLLSGILTVTDLSTKAPLSASMIQRYDEHREDLKQLKQFVKASLPEKYQEIFADSSKDGYAGYIEGKTNQEAFYKYLSKLLTKQEGSEYLLEKIKNEDFLRKQRTFDNGSIPHQVHLTELRAIIRRQSEYYPFLKENLDRIEKILTFRIPYYVGPLAREKSDFAWMTRKTDDSIRPWNFEDLVDKEKSAEAFIHRMTNNDLYLPEEKVLPKHSLIYEKFTVYNELTKVRFLAEGFKDFQFLNRKQKETIFNSLFKEKRKVTEKDIISFLNKVDGYEGIAIKGIEKQFNASLSTYHDLKKILGKDFLDNTDNELILEDIVQTLTLFEDREMIRKRLDIYKDFFTESQLKKLYRRHYTGWGRLSAKLINGIRNKENQKTILDYLIDDGSANRNFMQLIKDAGLSFKPIIDKARTGSHSDNLKEVVGELAGSPAIKKGILQSLKIVDELVKVMGYEPEQIVVEMARENQTTAKGLSRLRQRLTTLRESLANLKSEKKPKYVKDQVENHHLSDDRLFLYYLQNGKDMYTDDELDIDNLSQYDIDHIIPQAFIKDDSIDNRVLVSSAKNRGKSDDVPSVEIVKDCKVFWKKLLDAKLMSQRKYDNLTKAERGGLTSDDKARFIQRQLVETRQITKHVARILDERFNNELDSKGRRIRKVKIVTLKSNLVSNFRKEFGFYKIREVNNYHHAHDAYLNAVVAKAILTKYPQLEPEFVYGDYPKYNSYKTRKATEKLFFYSNIMNFFKTKVTLADGTVVVKDDIEVNNDTGEIVWDKKKHFATVRKVLSYPQVNIVKKTEIQTGGFSKESILAHGNSDKLIPRKTKDIYLDPKKYGGFDSPIVAYSVLVVADIKKGKAQKLKTVTELLGITIMERSRFEKNPSAFLESKGYLNIRDDKLMILPKYSLFELENGRRRLLASADELQKGNELALPTQFMKFLYLASRYNELKGKPEEIEQKQEFVVQHVSYFDDILQIINDFSNRVILADANLEKINKLYQDNKENIPVDELANNIINLFTFTSLGAPAAFKFFDKIVDRKRYTSTKEVLNSTLIHQSITGLYETRIDLGKLGED

SEQ ID NO: 59 - protein, 1365 aa, Streptococcus agalactiae
MNKPYSIGLDIGTNSVGWSIITDDYKVPAKKMRVLGNTDKEYIKKNLIGALLFDGGNTAADRRLKRTARRRYTRRRNRILYLQEIFAEEMSKVDDSFFHRLEDSFLVEEDKRGSKYPIFATMQEEKYYHEKFPTIYHLRKELADKKEKADLRLIYLALAHIIKFRGHFLIEDDRFDVRNTDIQKQYQAFLEIFDTTFENNDLLSQNVDVEAILTDKISKSAKKDRILARYPNQKSTGIFAEFLKLIVGNQADFKKHFNLEDKTPLQFAKDSYDEDLENLLGQIGDEFADLFSAAKKLYDSVLLSGILTVTDLSTKAPLSASMIQRYDEHREDLKQLKQFVKASLPEKYQEIFADSSKDGYAGYIEGKTNQEAFYKYLSKLLTKQEGSEYLLEKIKNEDFLRKQRTFDNGSIPHQVHLTELRAIIRRQSEYYPFLKENLDRIEKILTFRIPYYVGPLAREKSDFAWMTRKTDDSIRPWNFEDLVDKEKSAEAFIHRMTNNDLYLPEEKVLPKHSLIYEKFTVYNELTKVRFLAEGFKDFQFLNRKQKETIFNSLFKEKRKVTEKDIISFLNKVDGYEGIAIKGIEKQFNASLSTYHDLKKILGKDFLDNTDNELILEDIVQTLTLFEDREMIRKRLDIYKDFFTESQLKKLYRRHYTGWGRLSAKLINGIRNKENQKTILDYLIDDGSANRNFMQLIKDAGLSFKPIIDKARTGSHSDNLKEVVGELAGSPAIKKGILQSLKIVDELVKVMGYEPEQIVVEMARENQTTAKGLSRSRQRLTTLRESLANLKSEKKPKYVKDQVENHHLSDDRLFLYYLQNGKDMYTDDELDIDNLSQYDIDHIIPQAFIKDDSIDNRVLVSSAKNRGKSDDVPSVEIVKDCKVFWKKLLDAKLMSQRKYDNLTKAERGGLTSDDKARFIQRQLVETRQITKHVARILDERFNNELDSKGRRIRKVKIVTLKSNLVSNFRKEFGFYKIREVNNYHHAHDAYLNAVVAKAILTKYPQLEPEFVYGDYPKYNSYKTRKATEKLFFYSNIMNFFKTKVTLADGTVVVKDDIEVNNDTGEIVWDKKKHFATVRKVLSYPQVNIVKKTEIQTGGFSKESILAHGNSDKLIPRKTKDIYLDPKKYGGFDSPIVAYSVLVVADIKKGKAQKLKTVTELLGITIMERSRFEKNPSAFLESKGYLNIRDDKLMILPKYSLFELENGRRRLLASAGELQKGNELALPTQFMKFLYLASRYNELKGKPEEIEQKQEFVVQHVSYFDDILQIINDFSNRVILADANLEKINKLYQDNKENIPVDELANNIINLFTFTSLGAPAAFKFFDKIVDRKRYTSTKEVLNSTLIHQSITGLYETRIDLGKLGED

SEQ ID NO: 60 - protein, 1365 aa, Streptococcus agalactiae
MNKPYSIGLDIGTNSVGWSIITDDYKVPAKKMRVLGNTDKEYIKKNLIGALLFDGGNTAADRRLKRTARRRYTRRRNRILYLQEIFAEEMSKVDDSFFHRLEDSFLVEEDKRGSKYPIFATMQEEKYYHEKFPTIYHLRKELADKKEKADLRLIYLALAHIIKFRGHFLIEDDRFDVRNTDIQKQYQAFLEIFDTTFENNDLLSQNVDVEAILTDKISKSAKKDRILARYPNQKSTGIFAEFLKLIVGNQADFKKHFNLEDKTPLQFAKDSYDEDLENLLGQIGDEFADLFSAAKKLYDSVLLSGILTVTDLSTKAPLSASMIQRYDEHREDLKQLKQFVKASLPEKYQEIFADSSKDGYAGYIEGKTNQEAFYKYLSKLLTKQEGSEYLLEKIKNEDFLRKQRTFDNGSIPHQVHLTELRAIIRRQSEYYPFLKENLDRIEKILTFRIPYYVGPLAREKSDFAWMTRKTDDSIRPWNFEDLVDKEKSAEAFIHRMTNNDLYLPEEKVLPKHSLIYEKFTVYNELTKVRFLAEGFKDFQFLNRKQKETIFNSLFKEKRKVTEKDIISFLNKVDGYEGIAIKGIEKQFNASLSTYHDLKKILGKDFLDNTDNELILEDIVQTLTLFEDREMIRKRLDIYKDFFTESQLKKLYRRHYTGWGRLSAKLINGIRNKENQKTILDYLIDDGSANRNFMQLIKDAGLSFKPIIDKARTGSHSDNLKEVVGELAGSPAIKKGILQSLKIVDELVKVMGYEPEQIVVEMARENQTTAKGLSRSRQRLTTLRESLANLKSEKKPKYVKDQVENHHLSDDRLFLYYLQNGKDMYTDDELDIDNLSQYDIDHIIPQAFIKDDSIDNRVLVSSAKNRGKSDDVPSVEIVKDCKVFWKKLLDAKLMSQRKYDNLTKAERGGLTSDDKARFIQRQLVETRQITKHVARILDERFNNELDSKGRRIRKVKIVTLKSNLVSNFRKEFGFYKIREVNNYHHAHDAYLNAVVAKAILTKYPQLEPEFVYGDYPKYNSYKTRKATEKLFFYSNIMNFFKTKVTLADGTVVVKDDIEVNNDTGEIVWDKKKHFATVRKVLSYPQVNIVKKTEIQTGGFSKESILAHGNSDKLIPRKTKDIYLDPKKYGGFDSPKVAYSVLVVADIKKGKAQKLKTVTELLGITIMERSRFEKNPSAFLESKGYLNIRDDKLMILPKYSLFELENGRRRLLASAGELQKGNELALPTQFMKFLYLASRYNELKGKPEEIEQKQEFVVQHVSYFDDILQIINDFSNRVILADANLEKINKLYQDNKENIPVDELANNIINLFTFTSLGAPAAFKFFDKIVDRKRYTSTKEVLNSTLIHKSITGLYETRIDLGKLGED

SEQ ID NO: 61 - protein, 1365 aa, Streptococcus agalactiae
MNKPYSIGLDIGTNSVGWSIITDDYKVPAKKMRVLGNTDKEYIKKNLIGALLFDGGNTAADRRLKRTARRRYTRRRNRILYLQEIFAEEMSKVDDSFFHRLEDSFLVEEDKRGSKYPIFATMQEEKYYHEKFPTIYHLRKELADKKEKADLRLIYLALAHIIKFRGHFLIEDDRFDVRNTDIQKQYQAFLEIFDTTFENNDLLSQNVDVEAILTDKISKSAKKDRILARYPNQKSTGIFAEFLKLIVGNQADFKKHFNLEDKTPLQFAKDSYDEDLENLLGQIGDEFADLFSAAKKLYDSVLLSGILTVTDLSTKAPLSASMIQRYDEHREDLKQLKQFVKASLPEKYQEIFADSSKDGYAGYIEGKTNQEAFYKYLSKLLTKQEGSEYLLEKIKNEDFLRKQRTFDNGSIPHQVHLTELRAIIRRQSEYYPLLKENLDRIEKILTFRIPYYVGPLAREKSDFAWMTRKTDDSIRPWNFEDLVDKEKSAEAFIHRMTNNDLYLPEEKVLPKHSLIYEKFTVYNELTKVRFLAEGFKDFQFLNRKQKETIFNSLFKEKRKVTEKDIISFLNKVDGYEGIAIKGIEKQFNASLSTYHDLKKILGKDFLDNTDNELILEDIVQTLTLFEDREMIRKRLDIYKDFFTESQLKKLYRRHYTGWGRLSAKLINGIRNKENQKTILDYLIDDGSANRNFMQLIKDAGLSFKPIIDKARTGSHSDNLKEVVGELAGSPAIKKGILQSLKIVDELVKVMGYEPEQIVVEMARENQTTAKGLSRSRQRLTTLRESLANLKSEKKPKYVKDQVENHHLSDDRLFLYYLQNGKDMYTDDELDIDNLSQYDIDHIIPQAFIKDDSIDNRVLVSSAKNRGKSDDVPSVEIVKDCKVFWKKLLDAKLMSQRKYDNLTKAERGGLTSDDKARFIQRQLVETRQITKHVARILDERFNNELDSKGRRIRKVKIVTLKSNLVSNFRKEFGFYKIREVNNYHHAHDAYLNAVVAKAILTKYPQLEPEFVYGDYPKYNSYKTRKATEKLFFYSNIMNFFKTKVTLADGTVVVKDDIEVNNDTGEIVWDKKKHFATVRKVLSYPQVNIVKKTEIQTGGFSKESILAHGNSDKLIPRKTKDIYLDPKKYGGFDSPIVAYSVLVVADIKKGKAQKLKTVTELLGITIMERSRFEKNPSAFLESKGYLDIRDDKLMILPKYSLFELENGRRRLLASAGELQKGNELALPTQFMKFLYLASRYNELKGKPEEIEQKQEFVVQHVSYFDDILQIINDFSNRVILADANLEKINKLYQDNKENIPVDELANNIINLFTFTSLGAPAAFKFFDKIVDRKRYTSTKEVLNSTLIHQSITGLYETRIDLGKLGED

SEQ ID NO: 62 - protein, 1365 aa, Streptococcus agalactiae
  misc_feature (117)..(117): Xaa can be any naturally occurring amino acid
MNKPYSIGLDIGTNSVGWSIITDDYKVPAKKMRVLGNTDKEYIKKNLIGALLFDGGNTAADRRLKRTARRRYTRRRNRILYLQEIFAEEMSKVDDSFFHRLEDSFLVEEDKRGSKYXIFATLQEEKDYHEKFSTIYHLRKELADKKEKADLRLIYIALAHIIKFRGHFLIEDDSFDVRNTDISKQYQDFLEIFNTTFENNDLLSQNVDVEAILTDKISKSAKKDRILAQYPNQKSTGIFAEFLKLIVGNQADFKKYFNLEDKTPLQFAKDSYDEDLENLLGQIGDEFADLFSAAKKLYDSVLLSGILTVIDLSTKAPLSASMIQRYDEHREDLKQLKQFVKASLPEKYQEIFADSSKDGYAGYIEGKTNQEAFYKYLSKLLTKQEDSENFLEKIKNEDFLRKQRTFDNGSIPHQVHLTELKAIIRRQSEYYPFLKENQDRIEKILTFRIPYYIGPLAREKSDFAWMTRKTDDSIRPWNFEDLVDKEKSAEAFIHRMTNNDFYLPEEKVLPKHSLIYEKFTVYNELTKVRYKNEQGETYFFDSNIKQEIFDGVFKEHRKVSKKKLLDFLAKEYEEFRIVDVIGLDKENKAFNASLGTYHDLEKILDKDFLDNPDNESILEDIVQTLTLFEDREMIKKRLENYKDLFTESQLKKLYRRHYTGWGRLSAKLINGIRDKESQKTILDYLIDDGRSNRNFMQLINDDGLSFKSIISKAQAGSHSDNLKEVVGELAGSPAIKKGILQSLKIVDELVKVMGYEPEQIVVEMARENQTTNQGRRNSRQRYKLLDDGVKNLASNILKEYPTDNQALQNERLFLYYLQNGRDMYTGEALDIDNLSQYDIDHIIPQAFIKDDSIDNRVLVSSAKNRGKSDDVPSLEIVKDCKVFWKKLLDAKLMSQRKYDNLTKAERGGLTSDDKARFIQRQLVETRQITKHVARILDERFNNELDSKGRRIRKVKIVTLKSNLVSNFRKEFGFYKIREVNNYHHAHDAYLNAVVAKAILTKYPQLEPEFVYGDYPKYNSYKTRKATEKLFFYSNIMNFFKTKVTLADGTVVVKDDIEVNNDTGEIVWDKKKHFATVRKVLSYPQNNIVKKTEIQTGGFSKESILAHGNSDKLIPRKTKDIYLDPKKYGGFDSPIVAYSVLVVADIKKGKAQKLKTVTELLGITIMERSRFEKNPSAFLESKGYLNIRADKLIILPKYSLFELENGRRRLLASAGELQKGNELALPTQFMKFLYLASRYNESKGKPEEIEKKQEFVNQHVSYFDDILQLINDFSKRVILADANLEKINKLYQDNKENISVDELANNIINLFTFTSLGAPAAFKFFDKIVDRKRYTSTKEVLNSTLIHQSITGLYETRIDLGKLGED

SEQ ID NO: 63 - protein, 1365 aa, Streptococcus agalactiae
MNKPYSIGLDIGTNSVGWSIITDDYKVPAKKMRVLGNTDKEYIKKNLIGALLFDGGNTAADRRLKRTSRRRYTRRRNRILYLQEIFAEEMSKVDDSFFHRLEDSFLVEEDKRGSKYPIFATLQEEKDYHEKFSTIYHLRKELADKKEKADLRLIYIALAHIIKFRGHFLIEDDSFDVRNTDISKQYQDFLEIFNTTFENNDLLSQNVDVEAILTDKISKSAKKDRILAQYPNQKSTGIFAEFLKLIVGNQADFKKYFNLEDKTPLQFAKDSYDEDLENLLGQIGDEFADLFSAAKKLYDSVLLSGILTVIDLSTKAPLSASMIQRYDEHREDLKQLKQFVKASLPEKYQEIFADSSKDGYAGYIEGKTNQEAFYKYLSKLLTKQEDSENFLEKIKNEDFLRKQRTFDNGSIPHQVHLTELKAIIRRQSEYYPFLKENQDRIEKILTFRIPYYIGPLAREKSDFAWMTRKTDDSIRPWNFEDLVDKEKSAEAFIHRMTNNDFYLPEEKVLPKHSLIYEKFTVYNELTKVRYKNEQGETYFFDSNIKQEIFDGVFKEHRKVSKKKLLDFLAKEYEEFRIVDVIGLDKENKAFNASLGTYHDLEKILDKDFLDNPDNESILEDIVQTLTLFEDREMIKKRLENYKDLFTESQLKKLYRRHYTGWGRLSAKLINGIRDKESQKTILDYLIDDGRSNRNFMQLINDDGLSFKSIISKAQAGSHSDNLKEVVGELAGSPAIKKGILQSLKIVDELVKVMGYEPEQIVVEMARENQTTNQGRRNSRQRYKLLDDGVKNLASNILKEYPTDNQALQNERLFLYYLQNGRDMYTGEALDIDNLSQYDIDHIIPQAFIKDDSIDNRVLVSSAKNRGKSDDVPSLEIVKDCKVFWKKLLDAKLMSQRKYDNLTKAERGGLTSDDKARFIQRQLVETRQITKHVARILDERFNNELDSKGRRIRKVKIVTLKSNLVSNFRKEFGFYKIREVNNYHHAHDAYLNAVVAKAILTKYPQLEPEFVYGDYPKYNSYKTRKATEKLFFYSNIMNFFKTKVTLADGTVVVKDDIEVNNDTGEIVWDKKKHFATVRKVLSYPQNNIVKKTEIQTGGFSKESILAHGNSDKLIPRKTKDIYLDPKKYGGFDSPIVAYSVLVVADIKKGKAQKLKTVTELLGITIMERSRFEKNPSAFLESKGYLNIRADKLIILPKYSLFELENGRRRLLASAGELQKGNELALPTQFMKFLYLASRYNESKGKPEEIEKKQEFVNQHVSYFDDILQLINDFSKRVILADANLEKINKLYQDNKENISVDELANNIINLFTFTSLGAPAAFKFFDKIVDRKRYTSTKEVLNSTLIHQSITGLYETRIDLGKLGED

SEQ ID NO: 64 - protein, 1365 aa, Streptococcus agalactiae
MNKPYSIGLDIGTNSVGYSVVTDDYKVPAKKMRVLGNTDKEYIKKNLIGALLFDGGNTASDRRLKRTARRRYTCRRNRILYLQEIFAEEMSKVDDSFFHRLEDSFLVEDDKRGSKYPIFATMQEEKDYHEKFPTIYHLRKELADKKEKANLRLVYLALAHIIKFRGHFLIEDDSFDVRNTDIQRQYQAFLEIFDTTFENNHLLSQNIDVEGILTDKISKSAKKDRILAQYPNQKSTGIFAEFLKLIVGNQADFKKHFNLEDKTPLQFAKDSYDEDLENLLGQIGDEFADLFSVAKKLYDSVLLSGILTVTDLSTKAPLSASMIQRYDEHREDLKQLKQFVKASLPEKYQEIFTDSSKDGYAGYIEGKTNQGAFYKYLSKLLTKQEGSEYFLEKIKNEDFLRKQRTFDNGSIPHQVHLTELKAIIRRQSEYYPFLKENLDRIEKILTFRIPYYVGPLAREKSDFAWMTRKTDDSIRPWNFEELVDKEASAEAFIHRMTNNDLYLPEEKVLPKHSLIYEKFTVYNELTKVRYKNEQGETYFFDSNIKQEIFDGVFKEHRKVSKKKLLDFLAKEYEEFRIVDVIGLDKENKAFNASLGTYHDLKKILDKDFLDNPDNESILEDIVQTLTLFEDREMIKKRLENYKDLFTESQLKKLYRRHYTGWGRLSAKLINGIRDKESQKTILDYLISDGRANRNFMQLIHDDGLSFKPIIDKAQAGSHSDNLKEVVGELAGSPAIKKGILQSLKIVDELVKVMGYEPEQVVVEMARENQTTNQGRRNTRQRYKLLEEGVKNLASNILKEYPTDNQALQNERLFLYYLQNGRDMYTGEALDIDNLSQYDIDHIVPQAFIKDDSIDNRVLVSSAKNRGKSDNVPSIDIVKARKAFWKKLLDAKLMSQRKYDNLTKAERGGLTSDDKARFIQRQLVETRQITKHVARILDERFNNELDSKGRRIRKVKIVTLKSNLVSNFRKEFGFYKIREVNDYHHAHDAYLNAVVAKAILTKYPQLEPEFVYGDYPKYNSYKTRKATEKLFFYSNIMNFFKTKVTLADGTVVVKDDIEVNNDTGEIVWDKKKHFATVRKVLSYPQVNIVKKTEIQTGGFSKESILAHGNSDKLIPRKTKDIYLDPKKYGGFDSPIVAYSVLVVADIKKGKAQKLKTVTELLGITIMERFRFEKNPSAFLESKGYLNIRDDKLMILPKYSLFELENGRRRLLASAGELQKGNELALPTQYMKFLYLASRYNELKGKPEEIEQKQEFVVQHVSYFDDILQIINDFSNRVILADANLEKINKLYQDNKENISVDELANNIINLFTFTSLGAPAAFKFFDKIVDRKRYTSTKEVLNSTLIHQSITGLYETRIDLGKLGED

SEQ ID NO: 65 - protein, 1365 aa, Streptococcus agalactiae
MNKPYSIGLDIGTNSVGYSVVTDDYKVPAKKMRVLGNTDKEYIKKNLIGALLFDGGNTASDRRLKRTARRRYTRRRNRILYLQEIFAEEMSKVDDSFFHRLEDSFLVEDDKRGSKYPIFATMQEEKDYHEKFPTIYHLRKELADKKEKADLRLVYLALAHIIKFRGHFLIEDDSFDVRNTDIQRQYQAFLEIFDTTFENNHLLSQNIDVEGILTDKISKSAKKDRILAQYPNQKSTGIFAEFLKLIVGNQADFKKHFNLEDKTPLQFAKDSYDEDLENLLGQIGDEFADLFSVAKKLYDSVLLSGILTVTDLSTKAPLSASMIQRYDEHREDLKQLKQFVKASLPEKYQEIFTDSSKDGYAGYIEGKTNQGAFYKYLSKLLTKQEGSEYFLEKIKNEDFLRKQRTFDNGSIPHQVHLTELKAIIRRQSEYYPFLKENLDRIEKILTFRIPYYVGPLAREKSDFAWMTRKTDDSIRPWNFEELVDKEASAEAFIHRMTNNDLYLPEEKVLPKHSLIYEKFTVYNELTKVRYKNEQGETYFFDSNIKQEIFDGVFKEHRKVSKKKLLDFLAKEYEEFRIVDVIGLDKENKAFNASLGTYHDLKKILDKDFLDNPDNESILEDIVQTLTLFEDREMIKKRLENYKDLFTESQLKKLYRRHYTGWGRLSAKLINGIRDKESQKTILDYLISDGRANRNFMQLIHDDGLSFKPIIDKAQAGSHSDNLKEVVGELAGSPAIKKGILQSLKIVDELVKVMGYEPEQVVVEMARENQTTNQGRRNTRQRYKLLEEGVKNLASNILKEYPTDNQALQNERLFLYYLQNGRDMYTGEALDIDNLSQYDIDHIVPQAFIKDDSIDNRVLVSSAKNRGKSDNVPSIDIVKARKAFWKKLLDAKLMSQRKYDNLTKAERGGLTSDDKARFIQRQLVETRQITKHVARILDERFNNELDSKGRRIRKVKIVTLKSNLVSNFRKEFGFYKIREVNDYHHAHDAYLNAVVAKAILTKYPQLEPEFVYGDYPKYNSYKTRKATEKLFFYSNIMNFFKTKVTLADGTVVVKDDIEVNNDTGEIVWDKKKHFATVRKVLSYPQVNIVKKTEIQTGGFSKESILAHGNSDKLIPRKTKDIYLDPKKYGGFDSPIVAYSVLVVADIKKGKAQKLKTVTELLGITIMERFRFEKNPSAFLESKGYLNIRDDKLMILPKYSLFELENGRRRLLASAGELQKGNELALPTQYMKFLYLASRYNELKGKPEEIEQKQEFVVQHVSYFDDILQIINDFSNRVILADANLEKINKLYQDNKENISVDELANNIINLFTFTSLGAPAAFKFFDKIVDRKRYTSTKEVLNSTLIHQSITGLYETRIDLGKLGED

SEQ ID NO: 66 - protein, 1365 aa, Streptococcus agalactiae
MNKPYSIGLDIGTNSVGYSVVTDDYKVPAKKMRVLGNTDKEYIKKNLIGALLFDGGNTASDRRLKRTARRRYTRRRNRILYLQEIFAEEMSKVDDSFFHRLEDSFLVEDDKRGSKYPIFATMQEEKDYHEKFPTIYHLRKELADKKEKADLRLVYLALAHIIKFRGHFLIEDDSFDVRNTDIQRQYQAFLEIFDTTFENNHLLSQNIDVEGILTDKISKSAKKDRILAQYPNQKSTGIFAEFLKLIVGNQADFKKHFNLEDKTPLQFAKDSYDEDLENLLGQIGDEFADLFSVAKKLYDSVLLSGILTVTDLSTKAPLSASMIQRYDEHREDLKQLKQFVKASLPEKYQEIFTDSSKDGYAGYIEGKTNQGAFYKYLSKLLTKQEGSEYFLEKIKNEDFLRKQRTFDNGSIPHQVHLTELKAIIRRQSEYYPFLKENLDRIEKILTFRIPYYVGPLAREKSDFAWMTRKTDDSIRPWNFEELVDKEASAEAFIHRMTNNDLYLPEEKVLPKHSLIYEKFTVYNELTKVRYKNEQGETYFFDSNIKQEIFDGVFKEHRKVSKKKLLDFLAKEYEEFRIVDVIGLDKENKAFNASLGTYHDLKKILDKDFLDNPDNESILEDIVQTLTLFEDREMIKKRLENYKDLFTESQLKKLYRRHYTGWGRLSAKLINGIRDKESQKTILDYLISDGRANRNFMQLIHDDGLSFKPIIDKAQAGSHSDNLKEVVGELAGSPAIKKGILQSLKIVDELVKVMGYEPEQVVVEMARENQTTNQGRRNTRQRYKLLEEGVKNLASNILKEYPTDNQALQNERLFLYYLQNGRDMYTGETLDIDNLSQYDIDHIVPQAFIKDDSIDNRVLVSSAKNRGKSDNVPSIDIVKARKAFWKKLLDAKLMSQRKYDNLTKAERGGLTSDDKARFIQRQLVETRQITKHVARILDERFNNELDSKGRRIRKVKIVTLKSNLVSNFRKEFGFYKIREVNDYHHAHDAYLNAVVAKAILTKYPQLEREFVYGDYPKYNSYKTRKATEKLFFYSNIMNFFKTKVTLADGTVVVKDDIEVNNDTGEIVWDKKKHFATVRKVLSYPQVNIVKKTEIQTGGFSKESILAHGNSDKLIPRKTKDIYLDPKKYGGFDSPIVAYSVLVVADIKKGKAQKLKTVTELLGITIMERFRFEKNPSAFLESKGYLNIRDDKLMILPKYSLFELENGRRRLLASAGELQKGNELALPTQYMKFLYLASRYNELKGKPEEIEQKQEFVVQHVSYFDDILQIINDFSNRVILADANLEKINKLYQDNKENISVDELANNIINLFTFTSLGAPAAFKFFDKIVDRKRYTSTKEVLNSTLIHQSITGLYETRIDLGKLGED

SEQ ID NO: 67 - protein, 1365 aa, Streptococcus agalactiae
MNKPYSIGLDIGTNSVGYSVVTDDYKVPAKKMRVLGNTDKEYIKKNLIGALLFDGGNTASDRRLKRTARRRYTRRRNRILYLQEIFAEEMSKVDDSFFHRLEDSFLVEDDKRGSKYPIFATMQEEKDYHEKFPTIYHLRKELADKKEKANLRLVYLALAHIIKFRGHFLIEDDSFDVRNTDIQRQYQAFLEIFDTTFENNHLLSQNIDVEGILTDKISKSAKKDRILAQYPNQKSTGIFAEFLKLIVGNQADFKKHFNLEDKTPLQFAKDSYDEDLENLLGQIGDEFADLFSVAKKLYDSVLLSGILTVTDLSTKAPLSASMIQRYDEHREDLKQLKQFVKASLPEKYQEIFTDSSKDGYAGYIEGKTNQGAFYKYLSKLLTKQEGSEYFLEKIKNEDFLRKQRTFDNGSIPHQVHLTELKAIIRRQSEYYPFLKENLDRIEKILTFRIPYYVGPLAREKSDFAWMTRKTDDSIRPWNFEELVDKEASAEAFIHRMTNNDLYLPEEKVLPKHSLIYEKFTVYNELTKVRYKNEQGETYFFDSNIKQEIFDGVFKEHRKVSKKKLLDFLAKEYEEFRIVDVIGLDKENKAFNASLGTYHDLKKILDKDFLDNPDNESILEDIVQTLTLFEDREMIKKRLENYKDLFTESQLKKLYRRHYTGWGRLSAKLINGIRDKESQKTILDYLISDGRANRNFMQLIHDDGLSFKPIIDKAQAGSHSDNLKEVVGELAGSPAIKKGILQSLKIVDELVKVMGYEPEQVVVEMARENQTTNQGRRNTRQRYKLLEEGVKNLASNILKEYPTDNQALQNERLFLYYLQNGRDMYTGEALDIDNLSQYDIDHIVPQAFIKDDSIDNRVLVSSAKNRGKSDNVPSIDIVKARKAFWKKLLDAKLMSQRKYDNLTKAERGGLTSDDKARFIQRQLVETRQITKHVARILDERFNNELDSKGRRIRKVKIVTLKSNLVSNFRKEFGFYKIREVNDYHHAHDAYLNAVVAKAILTKYPQLEPEFVYGDYPKYNSYKTRKATEKLFFYSNIMNFFKTKVTLADGTVVVKDDIEVNNDTGEIVWDKKKHFATVRKVLSYPQVNIVKKTEIQTGGFSKESILAHGNSDKLIPRKTKDIYLDPKKYGGFDSPIVAYSVLVVADIKKGKAQKLKTVTELLGITIMERFRFEKNPSAFLESKGYLNIRDDKLMILPKYSLFELENGRRRLLASAGELQKGNELALPTQYMKFLYLASRYNELKGKPEEIEQKQEFVVQHVSYFDDILQIINDFSNRVILADANLEKINKLYQDNKENISVDELANNIINLFTFTSLGAPAAFKFFDKIVDRKRYTSTKEVLNSTLIHQFITGLYETRIDLGKLGED

SEQ ID NO: 68 - protein, 1365 aa, Streptococcus agalactiae
MNKPYSIGLDIGTNSVGYSVVTDDYKVPAKKMRVLGNTDKEYIKKNLIGALLFDGGNTASDRRLKRTARRRYTRRRNRILYLQEIFAEEMSKVDDSFFHRLEDSFLVEDDKRGSKYPIFATMQEEKDYHEKFPTIYHLRKELADKKEKANLRLVYLALAHIIKFRGHFLIEDDSFDVRNTDIQRQYQAFLEIFDTTFENNHLLSQNIDVEGILTDKISKSAKKDRILAQYPNQKSTGIFAEFLKLIVGNQADFKKHFNLEDKTPLQFAKDSYDEDLENLLGQIGDEFADLFSVAKKLYDSVLLSGILTVTDLSTKAPLSASMIQRYDEHREDLKQLKQFVKASLPEKYQEIFTDSSKDGYAGYIEGKTNQGAFYKYLSKLLTKQEGSEYFLEKIKNEDFLRKQRTFDNGSIPHQVHLTELKAIIRRQSEYYPFLKENLDRIEKILTFRIPYYVGPLAREKSDFAWMTRKTDDSIRPWNFEELVDKEASAEAFIHRMTNNDLYLPEEKVLPKHSLIYEKFTVYNELTKVRYKNEQGETYFFDSNIKQEIFDGVFKEHRKVSKKKLLDFLAKEYEEFRIVDVIGLDKENKAFNASLGTYHDLKKILDKDFLDNPDNESILEDIVQTLTLFEDREMIKKRLENYKDLFTESQLKKLYRRHYTGWGRLSAKLINGIRDKESQKTILDYLISDGRANRNFMQLIHDDGLSFKPIIDKAQAGSHSDNLKEVVGELAGSPAIKKGILQSLKIVDELVKVMGYEPEQVVVEMARENQTTNQGRRNTRQRYKLLEEGVKNLASNILKEYPTDNQALQNERLFLYYLQNGRDMYTGEALDIDNLSQYDIDHIVPQAFIKDDSIDNRVLVSSAKNRGKSDNVPSIDIVKARKAFWKKLLDAKLMSQRKYDNLTKAERGGLTSDDKARFIQRQLVETRQITKHVARILDERFNNELDSKGRRIRKVKIVTLKSNLVSNFRKEFGFYKIREVNDYHHAHDAYLNAVVAKAILTKYPQLEPEFVYGDYPKYNSYKTRKATEKLFFYSNIMNFFKTKVTLADGTVVVKDDIEVNNDTGEIVWDKKKHFATVRKVLSYPQVNIVKKTEIQTGGFSKESILAHGNSDKLIPRKTKDIYLDPKKYGGFDSPIVAYSVLVVADIKKGKAQKLKTVTELLGITIMERFRFEKNPSAFLESKGYLNIRDDKLMILPKYSLFELENGRRRLLASAGELQKGNELALPTQYMKFLYLASRYNELKGKPEEIEQKQEFVVQHVSYFDDILQIINDFSNRVILADANLEKINKLYQDNKENISVDELANNIINLFTFTSLGAPAAFKFFDKIVDRKRYTSTKEVLNSTLIHQSITGLYETRIDLGKLGED

SEQ ID NO: 69 - protein, 1365 aa, Streptococcus agalactiae
MNKPYSIGLDIGTNSVGWSIITDDYKVPAKKMRVLGNTDKEYIKKNLIGALLFDGGNTAADRRLKRTARRRYTRRRNRILYLQEIFAEEMSKVDDSFFHRLEDSFLVEEDKRGSKYPIFATMQEEKDYHEKFPTIYHLRKELADKKEKADLRLVYLALAHIIKFRGHFLIEDDRFDVRNTDIQKQYQAFLEIFDTSFENNHLLSQNVDVEAILTDKISKSAKKDRILAQYPNQKSTGIFAEFLKLIVGNQADFKKHFNLEDKTPLQFAKDSYDEDLENLLGQIGDEFADLFSAAKKLYDSVLLSGILTVTDLSTKAPLSASMIQRYDEHREDLKQLKQFVKASLPEKYQEIFADSSKDGYAGYIEGKTNQEAFYKYLSKLLTKQEDSEYFLEKIKNEDFLRKQRTFDNGSIPHQVHLTELKAIIRRQSEYYPFLKENQDKIEKILTFRIPYYVGPLARGNSDFAWMTRKTDDSIRPWNFEDLVDKEKSAEAFIHRMTNNDLYLPEEKVLPKHSLIYEKFTVYNELTKVRYKNEQGETYFFDSNVKQEIFDGVFKEHRKVSKKQLLDFLAKEFEEFRIVDVTGLDKENKAFNASLGTYHDLKKILDKDFLDNPDNESILEDIVQTITLFEDREMIKKRLENYKDLFTESQLKKLYRRHYTGWGRLSAKLINGIRDRESQKTILDYLISDGRANRNFMQLINDDGLSFKSIISKAQSGSHSDNLKEVVGELAGSPAIKKGILQSLKIVDELVKVMGYEPEQIVVEMARENQTTNQGRRNSRQRYKLLEDGVKNLASDILKEYPTDNQALQNERLFLYYLQNGRDMYTGEALDIDNLSQYDIDHIVPQAFIKDDSIDNRVLVSSAKNRGKSDDVPSIDIVKARKAFWKKLLDAKLISQRKYDNLTKAERGGLTPDDKAGFIQRQLVETRQITKHVARILDERFNNKVDDNNKPIRKVKIVTLKSNLVSNFRKEFGFYKIREVNNYHHAHDAYLNAVVAKAILTKYPQLEPEFVYGDYPKYNSYKTRKATEKLFFYSNIMNFFKTKVTLADETVVVKDDIEVNNETGEIAWDKKKHFATVRKVLSYPQVNIVKKTEVQTGGFSKESILAHSNSDKLIPRKTKDIYLDPKKYGGFDSPIVAYSVLVLADIKKGKAQKLKTVKELIGITIMERERFEKNPSAFLESKGYLNIRTDKLIILPKYSLFELENGRRRLLASAGELQKGNELALPTQYMKFLYLASRYNESKGKPEEIEKKQEFVNQHVSYFDDILQLINDFSKRVILADANLEKINKLYSDNKDNTPVDELAKNIINLFTFTSLGAPAAFKFFDKSVDRKRYTSTKEVLDSTLIHQSITGLYETRIDLGKLGED

SEQ ID NO: 70 - protein, 1365 aa, Streptococcus agalactiae
MNKPYSIGLDIGTNSVGWSIITDDYKVPAKKMRVLGNTDKEYIKKNLIGALLFDGGNTAADRRLKRTARRRYTRRRNRILYLQEIFAEEMSKVDDSFFHRLEDSFLVEEDKRGSKYPIFATMQEEKYYHEKFPTIYHLRKELADKKEKADLRLIYLALAHIIKFRGHFLIEDDRFDVRNTDIQKQYQAFLEIFDTTFENNDLLSQNVDVEAILTDKISKSAKKDRILARYPNQKSTGIFAEFLKLIVGNQADFKKHFNLEDKTPLQFAKDSYDEDLENLLGQIGDEFADLFSAAKKLYDSVLLSGILTVTDLSTKAPLSASMIQRYDEHREDLKQLKQFVKASLPEKYQEIFADSSKDGYAGYIEGKTNQEAFYKYLSKLLTKQEGSEYLLEKIKNEDFLRKQRTFDNGSIPHQVHLTELRAIIRRQSEYYPFLKENLDRIEKILTFRIPYYVGPLAREKSDFAWMTRKTDDSIRPWNFEDLVDKEKSAEAFIHRMTNNDLYLPEEKVLPKHSLIYEKFTVYNELTKVRFLAEGFKDFQFLNRKQKETIFNSLFKEKRKVTEKDIISFLNKVDGYEGIAIKGIEKQFNASLSTYHDLKKILGKDFLDNTDNELILEDIVQTLTLFEDREMIRKRLDIYKDFFTESQLKKLYRRHYTGWGRLSAKLINGIRNKENQKTILDYLIDDGSANRNFMQLIKDAGLSFKPIIDKARTGSHSDNLKEVVGELAGSPAIKKGILQSLKIVDELVKVMGYEPEQIVVEMARENQTTAKGLSRLRQRLTTLRESLANLKSEKKPKYVKDQVENHHLSDDRLFLYYLQNGKDMYTDDELDIDNLSQYDIDLIIPQAFIKDDSIDNRVLVSSAKNRGKSDDVPSVEIVKDCKVFWKKLLDAKLMSQRKYDNLTKAERGGLTSDDKARFIQRQLVETRQITKHVARILDERFNNELDSKGRRIRKVKIVTLKSNLVSNFRKEFGFYKIREVNNYHHAHDAYLNAVVAKAILTKYPQLEPEFVYGDYPKYNSYKTRKATEKLFFYSNIMNFFKTKVTLADGTVVVKDDIEVNNDTGEIVWDKKKHFATVRKVLSYPQVNIVKKTEIQTGGFSKESILAHGNSDKLIPRKTKDIYLDPKKYGGFDSPIVAYSVLVVADIKKGKAQKLKTVTELLGITIMERSRFEKNPSAFLESKGYLNIRDDKLMILPKYSLFELENGRRRLLASADELQKGNELALPTQFMKFLYLASRYNELKGKPEEIEQKQEFVVQHVSYFDDILQIINDFSNRVILADANLEKINKLYQDNKENIPVDELANNIINLFTFTSLGAPAAFKFFDKIVDRKRYTSTKEVLNSTLIHQSITGLYETRIDLGKLGED

SEQ ID NO: 71 - protein, 1365 aa, Streptococcus agalactiae
MNKPYSIGLDIGTNSVGWSIITDDYKVPAKKMRVLGNTDKEYIKKNLIGALLFDGGNTASDRRLKRTARRRYTRRRNRILYLQEIFAEEMSKVDDSFFHRLEDSFLVEDDKRGSKYPIFATMQEEKDYHEKFPTIYHLRKELADKKEKADLRLFYLALAHIIKFRGHFLIEDDSFDVRNTDIQRQYQAFLEIFDTTFENNHLLSQNIDIEGILTDKISKSAKKDRILAQYPNQKSTGIFAEFLKLIVGNQADFKKHFNLEDKTPLQFAKDSYDEDLENLLGQIGDEFADLFSVAKKLYDSVLLSGILTVTDLSTKAPLSASMIQRYDEHREDLKQLKQFVKASLPEKYQEIFTDSSKDGYAGYIEGKTNQGAFYKYLSKLLTKQEGSEYFLEKIKNEDFLRKQRTFDNGSIPHQVHLTELKAIIRRQSEYYPFLKENLDRIEKILTFRIPYYVGPLAREKSDFAWMTRKTDDSIRPWNFEELVDKEASAEAFIHRMTNNDLYLPEEKVLPKHSLIYEKFTVYNELTKVRYKNEQGETYFFDSNIKQEIFDGVFKEHRKVSKKKLLDFLAKEYEEFRIVDVIGLDKENKAFNASLGTYHDLKKILDKDFLDNPDNESILEDIVQTLTLFEDREMIKKRLENYKDLFTESQLKKLYRRHYTGWGRLSAKLINGIRDKESQKTILDYLIDDGKSNRNFMQLIHDDGLSFKSIISKAQAGSHSDNLKEVVGELAGSPAIKKGILQSLKIVDELVKVMGYEPEQIVVEMARENQTTNQGRRNSRQRYKLLDDGVKNLASNILKEYPTDNQALQNERLFLYYLQNGRDMYTGKALDIDNLSQYDIDHIIPQAFIKDDSIDNRVLVSSAKNRGKSDDVPSLEIVKDCKVFWKKLLDAKLMSQRKYDNLTKAERGGLTSDDKARFIQRQLVETRQITKHVARILDERFNNELDSKGRRIRKVKIVTLKSNLVSNFRKEFGFYKIREVNNYHHAHDAYLNAVVAKAILTKYPQLEPEFVYGDYPKYNSYKTRKATEKLFFYSNIMNFFKTKVTLADGTVVVKDDIEVNNDTGEIVWDKKKHFATVRKVLSYPQVNIVKKTEIQTGGFSKESILAHGNSDKLIPRKTKDIYLDPKKYGGFDSPIVAYSVLVVADIKKGKAQKLKTVTELLGITIMERSRFEKNPSAFLESKGYLNIRDDKLMILPKYSLFELENGRRRLLASAGELQKGNELALPTQFMKFLYLASRYNELKGKPEEIEQKQEFVVQHVSYFDDILQIINDFSNRVILADANLEKINKLYQDNKENISVDELANNIINLFTFTSLGAPAAFKFFDKIVDRKRYTSTKEVLNSTLIHQSITGLYETRIDLGKLGED

SEQ ID NO: 72 - protein, 1365 aa, Streptococcus agalactiae
MNKPYSIGLDIGTNSVGWSIITDDYKVPAKKMRVLGNTDKEYIKKNLIGALLFDGGNTASDRRLKRTARRRYTRRRNRILYLQEIFAEEMSKVDDSFFHRLEDSFLVEDDKRGSKYPIFATMQEEKDYHEKFPTIYHLRKELADKKEKADLRLFYLALAHIIKFRGHFLIEDDSFDVRNTDIQRQYQAFLEIFDTTFENNHLLSQNIDVEGILTDKISKSAKKDRILAQYPNQKSTGIFAEFLKLIVGNQADFKKHFNLEDKTPLQFAKDSYDEDLENLLGQIGDEFADLFSVAKKLYDSVLLSGILTVTDLSTKAPLSASMIQRYDEHREDLKQLKQFVKASLPEKYQEIFTDSSKDGYAGYIEGKTNQGAFYKYLSKLLTKQEGSEYFLEKIKNEDFLRKQRTFDNGSIPHQVHLTELKAIIRRQSEYYPFLKENLDRIEKILTFRIPYYVGPLAREKSDFAWMTRKTDDSIRPWNFEELVDKEASAEAFIHRMTNNDLYLPEEKVLPKHSLIYEKFTVYNELTKVRYKNEQGETYFFDSNIKQEIFDGVFKEHRKVSKKKLLDFLAKEYEEFRIVDVIGLDKENKAFNASLGTYHDLKKILDKDFLDNPDNESILEDIVQTLTLFEDREMIKKRLENYKDLFTESQLKKLYRRHYTGWGRLSAKLINGIRDKESQKTILDYLIDDGKSNRNFMQLIHDDGLSFKSIISKAQAGSHSDNLKEVVGELAGSPAIKKGILQSLKIVDELVKVMGYEPEQIVVEMARENQTTNQGRRNSRQRYKLLDDGVKNLASNILKEYPTDNQALQNERLFLYYLQNGRDMYTGKALDIDNLSQYDIDHIIPQAFIKDDSIDNRVLVSSAKNRGKSDDVPSLEIVKDCKVFWKKLLDAKLMSQRKYDNLTKAERGGLTSDDKARFIQRQLVETRQITKHVARILDERFNNELDSKGRRIRKVKIVTLKSNLVSNFRKEFGFYKIREVNNYHHAHDAYLNAVVAKAILTKYPQLEPEFVYGDYPKYNSYKTRKATEKLFFYSNIMNFFKTKVTLADGTVVVKDDIEVNNDTGEIVWDKKKHFATVRKVLSYPQVNIVKKTEIQTGGFSKESILAHGNSDKLIPRKTKDIYLDPKKYGGFDSPIVAYSVLVVADIKKGKAQKLKTVTELLGITIMERSRFEKNPSAFLESKGYLNIRDDKLMILPKYSLFELENGRRRLLASAGELQKGNELALPTQFMKFLYLASRYNELKGKPEEIEQKQEFVVQHVSYFDDILQIINDFSNRVILADANLEKINKLYQDNKENISVDELANNIINLFTFTSLGAPAAFKFFDKIVDRKRYTSTKEVLNSTLIHQSITGLYETRIDLGKLGED

SEQ ID NO: 73 - protein, 1365 aa, Streptococcus agalactiae
MNKPYSIGLDIGTNSVGWSIITDDYKVPAKKMRVLGNTDKEYIKKNLIGALLFDGGNTAADRRLKRTARRRYTRRRNRILYLQEIFAEEMSKVDDSFFHRLEDSFLVEEDKRGSKYPIFATLQEEKDYHEKFPTIYHLRKELADKKEKADLRLIYIALAHIIKFRGHFLIEDDSFDVRNTDISKQYQDFLEIFNTTFENNDLLSQNVDVEAILTDKISKSAKKDRILAQYPNQKSTGIFAEFLKLIVGNQADFKKYFNLEDKTPLQFAKDSYDEDLENLLGQIGDEFADLFSAAKKLYDSVLLSGILTVIDLSTKAPLSASMIQRYDEHREDLKQLKQFVKASLPEKYQEIFADSSKDGYAGYIEGKTNQEAFYKYLSKLLTKQEDSENFLEKIKNEDFLRKQRTFDNGSIPHQVHLTELKAIIRRQSEYYPFLKENQDRIEKILTFRIPYYIGPLAREKSDFAWMTRKTDDSIRPWNFEDLVDKEKSAEAFIHRMTNNDFYLPEEKVLPKHSLIYEKFTVYNELTKVRYKNEQGETYFFDSNIKQEIFDGVFKEHRKVSKKKLLDFLAKEYEEFRIVDVIGLDKENKAFNASLGTYHDLEKILDKDFLDNPDNESILEDIVQTLTLFEDREMIKKRLENYKDLFTESQLKKLYRRHYTGWGRLSAKLINGIRDKESQKTILDYLIDDGRSNRNFMQLINDDGLSFKSIISKAQAGSHSDNLKEVVGELAGSPAIKKGILQSLKIVDELVKVMGYEPEQIVVEMARENQTTNQGRRNSRQRYKLLDDGVKNLASNILKEYPTDNQALQNERLFLYYLQNGRDMYTGEALDIDNLSQYDIDHIIPQAFIKDDSIDNRVLVSSAKNRGKSDDVPSLEIVKDCKVFWKKLLDAKLMSQRKYDNLTKAERGGLTSDDKARFIQRQLVETRQITKHVARILDERFNNELDSKGRRIRKVKIVTLKSNLVSNFRKEFGFYKIREVNNYHHAHDAYLNAVVAKAILTKYPQLEPEFVYGDYPKYNSYKTRKATEKLFFYSNIMNFFKTKVTLADGTVVVKDDIEVNNDTGEIVWDKKKHFATVRKVLSYPQNNIVKKTEIQTGGFSKESILAHGNSDKLIPRKTKDIYLDPKKYGGFDSPIVAYSVLVVADIKKGKAQKLKTVTELLGITIMERSRFEKNPSAFLESKGYLNIRADKLIILPKYSLFELENGRRRLLASAGELQKGNELALPTQFMKFLYLASRYNESKGKPEEIEKKQEFVNQHVSYFDDILQLINDFSKRVILADANLEKINKLYQDNKENISVDELANNIINLFTFTSLGAPAAFKFFDKIVDRKRYTSTKEVLNSTLIHQSITGLYETRIDLGKLGED

SEQ ID NO: 74 - protein, 1365 aa, Streptococcus agalactiae
MNKPYSIGLDIGTNSVGYSVVTDDYKVPAKKMRVLGNTDKEYIKKNLIGALLFDGGNTASDRRLKRTARRRYTRRRNRILYLQEIFAEEMSKVDDSFFHRLEDSFLVEDDKRGSKYPIFATMQEEKDYHEKFPTIYHLRKELADKKEKADLRLVYLALAHIIKFRGHFLIEDDSFDVRNTDIQRQYQAFLEIFDTTFENNHLLSQNIDVEGILTDKISKSAKKDRILAQYPNQKSTGIFAEFLKLIVGNQADFKKHFNLEDKTPLQFAKDSYDEDLENLLGQIGDEFADLFSVAKKLYDSVLLSGILTVTALSTKAPLSASMIQRYDEHREDLKQLKQFVKASLPEKYQEIFTDSSKDGYAGYIEGKTNQGAFYKYLSKLLTKQEGSEYFLEKIKNEDFLRKQRTFDNGSIPHQVHLTELKAIIRRQSEYYPFLKENLDRIEKILTFRIPYYVGPLAREKSDFAWMTRKTDDSIRPWNFEELVDKEASAEAFIHRMTNNDLYLPEEKVLPKHSLIYEKFTVYNELTKVRYKNEQGETYFFDSNIKQEIFDGVFKEHRKVSKKKLLDFLAKEYEEFRIVDVIGLDKENKAFNASLGTYHDLKKILDKDFLDNPDNESILEDIVQTLTLFEDREMIKKRLENYKDLFTESQLKKLYRRHYTGWGRLSAKLINGIRDKESQKTILDYLISDGRANRNFMQLIHDDGLSFKPIIDKAQAGSHSDNLKEVVGELAGSPAIKKGILQSLKIVDELVKVMGYEPEQVVVEMARENQTTNQGRRNTRQRYKLLEEGVKNLASNILKEYPTDNQALQNERLFLYYLQNGRDMYTGEALDIDNLSQYDIDHIVPQAFIKDDSIDNRVLVSSAKNRGKSDNVPSIDIVKARKAFWKKLLDAKLMSQRKYDNLTKAERGGLTSDDKARFIQRQLVETRQITKHVARILDERFNNELDSKGRRIRKVKIVTLKSNLVSNFRKEFGFYKIREVNDYHHAHDAYLNAVVAKAILTKYPQLEPEFVYGDYPKYNSYKTRKATEKLFFYSNIMNFFKTKVTLADGTVVVKDDIEVNNDTGEIVWDKKKHFATVRKVLSYPQVNIVKKTEIQTGGFSKESILAHGNSDKLIPRKTKDIYLDPKKYGGFDSPIVAYSVLVVADIKKGKAQKLKTVTELLGITIMERFRFEKNPSAFLESKGYLNIRDDKLMILPKYSLFELENGRRRLLASAGELQKGNELALPTQYMKFLYLASRYNELKGKPEEIEQKQEFVVQHVSYFDDILQIINDFSNRVILADANLEKINKLYQDNKENISVDELANNIINLFTFTSLGAPAAFKFFDKIVDRKRYTSTKEVLNSTLIHQSITGLYETRIDLGKLGED

SEQ ID NO: 75 - protein, 1365 aa, Streptococcus agalactiae
MNKPYSIGLDIGTNSVGWSIITDDYKVPAKKMRVLGNTDKEYIKKNLIGALLFDGGNTAADRRLKRTARRRYTRRRNRILYLQEIFAEEMSKVDDSFFHRLEDSFLVEEDKRGSKYPIFATLQEEKDYHEKFSTIYHLRKELADKKEKADLRLIYIALAHIIKFRGHFLIEDDSFDVRNTDISKQYQDFLEIFNTTFENNDLLSQNVDVEAILTDKISKSAKKDRILAQYPNQKSTGIFAEFLKLIVGNQADFKKYFNLEDKTPLQFAKDSYDEDLENLLGQIGDEFADLFSAAKKLYDSVLLSGILTVIDLSTKAPLSASMIQRYDEHREDLKQLKQFVKASLPEKYQEIFADSSKDGYAGYIEGKTNQEAFYKYLSKLLTKQEDSENFLEKIKNEDFLRKQRTFDNGSIPHQVHLTELKAIIRRQSEYYPFLKENQDRIEKILTFRIPYYIGPLAREKSDFAWMTRKTDDSIRPWNFEDLVDKEKSAEAFIHRMTNNDFYLPEEKVLPKHSLIYEKFTVYNELTKVRYKNEQGETYFFDSNIKQEIFDGVFKEHRKVSKKKLLDFLAKEYEEFRIVDVIGLDKENKAFNASLGTYHDLEKILDKDFLDNPDNESILEDIVQTLTLFEDREMIKKRLENYKDLFTESQLKKLYRRHYTGWGRLSAKLINGIRDKESQKTILDYLIDDGRSNRNFMQLINDDGLSFKSIISKAQAGSHSDNLKEVVGELAGSPAIKKGILQSLKIVDELVKVMGYEPEQIVVEMARENQTTNQGRRNSRQRYKLLDDGVKNLASNILKEYPTDNQALQNERLFLYYLQNGRDMYTGEALDIDNLSQYDIDHIIPQAFIKDDSIDNRVLVSSAKNRGKSDDVPSLEIVKDCKVFWKKLLDAKLMSQRKYDNLTKAERGGLTSDDKARFIQRQLVETRQITKHVARILDERFNNELDSKGRRIRKVKIVTLKSNLVSNFRKEFGFYKIREVNNYHHAHDAYLNAVVAKAILTKYPQLEPEFVYGDYPKYNSYKTRKATEKLFFYSNIMNFFKTKVTLADGTVVVKDDIEVNNDTGEIVWDKKKHFATVRKVLSYPQNNIVKKTEIQTGGFSKESILAHGNSDKLIPRKTKDIYLDPKKYGGFDSPIVAYSVLVAADIKKGKAQKLKTVTELLGITIMERSRFEKNPSAFLESKGYLNIRADKLIILPKYSLFELENGRRRLLASAGELQKGNELALPTQFMKFLYLASRYNESKGKPEEIEKKQEFVNQHVSYFDDILQLINDFSKRVILADANLEKINKLYQDNKENISVDELANNIINLFTFTSLGAPAAFKFFDKIVDRKRYTSTKEVLNSTLIHQSITGLYETRIDLGKLGED

SEQ ID NO: 76 - protein, 1365 aa, Streptococcus agalactiae
MNKPYSIGLDIGTNSVGWSIITDDYKVPAKKMRVLGNTDKEYIKKNLIGALLFDGGNTAADRRLKRTARRRYTRRRNRILYLQEIFAEEMSKVDDSFFHRLEDSFLVEEDKRGSKYPIFATLQEEKDYHEKFSTIYHLRKELADKKEKADLRLIYIALAHIIKFRGHFLIEDDSFDVRNTDISKQYQDFLEIFNTTFENNDLLSQNVDVEAILTDKISKSAKKDRILAQYPNQKSTGIFAEFLKLIVGNQADFKKYFNLEDKTPLQFAKDSYDEDLENLLGQIGDEFADLFSAAKKLYDSVLLSGILTVIDLSTKASLSDSMIQRYDEHREDLKQLKQFVKASLPEKYQEIFADSSKDGYAGYIEGKTNQEAFYKYLSKLLTKQEDSENFLEKIKNEDFLRKQRTFDNGSIPHQVHLTELKAIIRRQSEYYPFLKENQDRIEKILTFRIPYYIGPLAREKSDFAWMTRKTDDSIRPWNFEDLVDKEKSAEAFIHRMTNNDFYLPEEKVLPKHSLIYEKFTVYNELTKVRYKNEQGETYFFDSNIKQEIFDGVFKEHRKVSKKKLLDFLAKEYEEFRIVDVIGLDKENKAFNASLGTYHDLEKILDKDFLDNPDNESILEDIVQTLTLFEDREMIKKRLENYKDLFTESQLKKLYRRHYTGWGRLSAKLINGIRDKESQKTILDYLIDDGRSNRNFMQLINDDGLSFKSIISKAQAGSHSDNLKEVVGELAGSPAIKKGILQSLKIVDELVKVMGYEPEQIVVEMARENQTTNQGRRNSRQRYKLLDDGVKNLASNILKEYPTDNQALQNERLFLYYLQNGRDMYTGEALDIDNLSQYDIDHIIPQAFIKDDSIDNRVLVSSAKNRGKSDDVPSLEIVKDCKVFWKKLLDAKLMSQRKYDNLTKAERGGLTSDDKARFIQRQLVETRQITKHVARILDERFNNELDSKGRRIRKVKIVTLKSNLVSNFRKEFGFYKIREVNNYHHAHDAYLNAVVAKAILTKYPQLEPEFVYGDYPKYNSYKTRKATEKLFFYSNIMNFFKTKVTLADGTVVVKDDIEVNNDTGEIVWDKKKHFATVRKVLSYPQNNIVKKTEIQTGGFSKESILAHGNSDKLIPRKTKDIYLDPKKYGGFDSPIVAYSVLVVADIKKGKAQKLKTVTELLGITIMERSRFEKNPSAFLESKGYLNIRADKLIILPKYSLFELENGRRRLLASAGELQKGNELALPTQFMKFLYLASRYNESKGKPEEIEKKQEFVNQHVSYFDDILQLINDFSKRVILADANLEKINKLYQDNKENISVDELANNIINLFTFTSLGAPAAFKFFDKIVDRKRYTSTKEVLNSTLIHQSITGLYETRIDLGKLGED

SEQ ID NO: 77 - protein, 1365 aa, Streptococcus agalactiae
MNKPYSIGLDIGTNSVGWSIITDDYKVPAKKMRVLGNTDKEYIKKNLIGALLFDGGNTAADRRLKRTARRRYTRRRNRILYLQEIFAEEMSKVDDSFFHRLEDSFLVEEDKRGSKYPIFATLQEEKDYHEKFSTIYHLRKELADKKEKADLRLIYIALAHIIKFRGHFLIEDDSFDVRNTDISKQYQDFLEIFNTTFENNDLLSQNVDVEAILTDKISKSAKKDRILAQYPNQKSTGIFAEFLKLIVGNQADFKKYFNLEDKTPLQFAKDSYDEDLENLLGQIGDEFADLFSAAKKLYDSVLLSGILTVIDLSTKAPLSASMIQRYDEHREDLKQLKQFVKASLPEKYQEIFADSSKDGYAGYIEGKTNQEAFYKYLSKLLTKQEDSENFLEKIKNEDFLRKQRTFDNGSIPHQVHLTELKAIIRRQSEYYPFLKENQDRIEKILTFRIPYYIGPLAREKSDFAWMTRKTDDSIRPWNFEDLVDKEKSAEAFIHRMTNNDFYLPEEKVLPKHSLIYEKFTVYNELTKVRYKNEQGETYFFDSNIKQEIFDGVFKEHRKVSKKKLLDFLAKEYEEFRIVDVIGLDKENKAFNASLGTYHDLEKILDKDFLDNPDNESILEDIVQTLTLFEDREMIKKRLENYKDLFTESQLKKLYRRHYTGWGRLSAKLINGIRDKESQKTILDYLIDDGRSNRNFMQLINDDGLSFKSIISKAQAGSHSDNLKEVVGELAGSPAIKKGILQSLKIVDELVKVMGYEPEQIVVEMARENQTTNQGRRNSRQRYKLLDDGVKNLASNILKEYPTDNQALQNERLFLYYLQNGRDMYTGEALDIDNLSQYDIDHIIPQAFIKDDSIDNRVLVSSAKNRGKSDDVPSLEIVKDCKVFWKKLLDAKLMSQRKYDNLTKAERGGLTSDDKARFIQRQLVEIRQITKHVARILDERFNNELDSKGRRIRKVKIVTLKSNLVSNFRKEFGFYKIREVNNYHHAHDAYLNAVVAKAILTKYPQLEPEFVYGDYPKYNSYKTRKATEKLFFYSNIMNFFKTKVTLADGTVVVKDDIEVNNDTGEIVWDKKKHFATVRKVLSYPQNNIVKKTEIQTGGFSKESILAHGNSDKLIPRKTKDIYLDPKKYGGFDSPIVAYSVLVVADIKKGKAQKLKTVTELLGITIMERSRFEKNPSAFLESKGYLNIRADKLIILPKYSLFELENGRRRLLASAGELQKGNELALPTQFMKFLYLASRYNESKGKPEEIEKKQEFVNQHVSYFDDILQLINDFSKRVILADANLEKINKLYQDNKENISVDELANNIINLFTFTSLGAPAAFKFFDKIVDRKRYTSTKEVLNSTLIHQSITGLYETRIDLGKLGED

SEQ ID NO: 78 - protein, 1365 aa, Streptococcus agalactiae
MNKPYSIGLDIGTNSVGWSIITDDYKVPAKKMRVLGNTDKEYIKKNLIGALLFDGGNTAADRRLKRTARRRYTRRRNRILYLQEIFAEEMSKVDDSFFHRLEDSFLVEEDKRGSKYPIFATLQEEKDYHEKFSTIYHLRKELADKKEKADLRLIYIALAHIIKFRGHFLIEDDSFDVRNTDISKQYQDFLEIFNTTFENNDLLSQNVDVEAILTDKISKSAKKDRILAQYPNQKSTGIFAEFLKLIVGNQADFKKYFNLEDKTPLQFAKDSYDEDLENLLGQIGDEFADLFSAAKKLYDSVLLSGILTVIDLSTKAPLSASMIQRYDEHREDLKQLKQFVKASLPEKYQEIFADSSKDGYAGYIEGKTNQEAFYKYLSKLLTKQEDSENFLEKIKNEDFLRKQRTFDNGSIPHQVHLTELKAIIRRQSEYYPFLKENQDRIEKILTFRIPYYIGPLAREKSDFAWMTRKTDDSIRPWNFEDLVDKEKSAEAFIHRMTNNDFYLPEEKVLPKHSLIYEKFTVYNELTKVRYKNEQGETYFFDSNIKQEIFDGVFKEHRKVSKKKLLDFLAKEYEEFRIVDVIGLDKENKAFNASLGTYHDLEKILDKDFLDNPDNESILEDIVQTLTLFEDREMIKKRLENYKDLFTESQLKKLYRRHYTGWGRLSAKLINGIRDKESQKTILDYLIDDGRSNRNFMQLINDDGLSFKSIISKAQAGSHSDNLKEVVGELAGSPAIKKGILQSLKIVDELVKVMGYEPEQIVVEMARENQTTNQGRRNSRQRYKLLDDGVKNLASNILKEYPTDNQALQNERLFLYYLQNGRDMYTGEALDIDNLSQYDIDHIIPQAFIKDDSIDNRVLVSSAKNRGKSDDVPSLEIVKDCKVFWKKLLDAKLMSQRKYDNLTKAERGGLTSDDKARFIQRQLVETRQITKHVARILDERFNNELDSKGRRIRKVKIVTVKSNLVSNFRKEFGFYKIREVNNYHHAHDAYLNAVVAKAILTKYPQLEPEFVYGDYPKYNSYKTRKATEKLFFYSNIMNFFKTKVTLADGTVVVKDDIEVNNDTGEIVWDKKKHFATVRKVLSYPQNNIVKKTEIQTGGFSKESILAHGNSDKLIPRKTKDIYLDPKKYGGFDSPIVAYSVLVVADIKKGKAQKLKTVTELLGITIMERSRFEKNPSAFLESKGYLNIRADKLIILPKYSLFELENGRRRLLASAGELQKGNELALPTQFMKFLYLASRYNESKGKPEEIEKKQEFVNQHVSYFDDILQLINDFSKRVILADANLEKINKLYQDNKENISVDELANNIINLFTFTSLGAPAAFKFFDKIVDRKRYTSTKEVLNSTLIHQSITGLYETRIDLGKLGED

SEQ ID NO: 79 - protein, 1365 aa, Streptococcus agalactiae
MNKPYSIGLDIGTNSVGWSIITDDYKVPAKKMRVLGNTDKEYIKKNLIGALLFDGGNTAADRRLKRTARRRYTRRRNRILYLQEIFAEEMSKVDDSFFHRLEDSFLVEEDKRGSKYPIFATLQEEKDYHEKFSTIYHLRKELADKKEKADLRLIYIALAHIIKFRGHFLIEDDSFDVRNTDISKQYQDFLEIFNTTFENNDLLSQNVDVEAILTDKISKSAKKDRILAQYPNQKSTGIFAEFLKLIVGNQADFKKYFNLEDKTPLQFAKDSYDEDLENLLGQIGDEFADLFSAAKKLYDSVLLSGILTVIDLSTKAPLSASMIQRYDEHREDLKQLKQFVKASLPEKYQEIFADSSKDGYAGYIEGKTNQEAFYKYLSKLLTKQEDSENFLEKIKNEDFLRKQRTFDNGSIPHQVHLTELKAIIRRQSEYYPFLKENQDRIEKILTFRIPYYIGPLAREKSDFAWMTRKTDDSIRPWNFEDLVDKEKSAEAFIHRMTNNDFYLPEEKVLPKHSLIYEKFTVYNELTKVRYKNEQGETYFFDSNIKQEIFDGVFKEHRKVSKKKLLDFLAKEYEEFRIVDVIGLDKENKAFNASLGTYHDLEKILDKDFLDNPDNESILEDIVQTLTLFEDREMIKKRLENYKDLFTESQLKKLYRRHYTGWGRLSAKLINGIRDKESQKTILDYLIDDGRSNRNFMQLINDDGLSFKSIISKAQAGSHSDNLKEVVGELAGSPAIKKGILQSLKIVDELVKVMGYEPEQIVVEMARENQTTNQGRRNSRQRYKLLDDGVKNLASNILKEYPTDNQALQNERLFLYYLQNGRDMYTGEALDIDNLSQYDIDHIIPQAFIKDDSIDNRVLVSSAKNRGKSDDVPSLEIVKDCKVFWKKLLDAKLMSQRKYDNLTKAERGGLTSDDKARFIQRQLVETRQITKHVARILDELFNNELDSKGRRIRKVKIVTLKSNLVSNFRKEFGFYKIREVNNYHHAHDAYLNAVVAKAILTKYPQLEPEFVYGDYPKYNSYKTRKATEKLFFYSNIMNFFKTKVTLADGTVVVKDDIEVNNDTGEIVWDKKKHFATVRKVLSYPQNNIVKKTEIQTGGFSKESILAHGNSDKLIPRKTKDIYLDPKKYGGFDSPIVAYSVLVVADIKKGKAQKLKTVTELLGITIMERSRFEKNPSAFLESKGYLNIRADKLIILPKYSLFELENGRRRLLASAGELQKGNELALPTQFMKFLYLASRYNESKGKPEEIEKKQEFVNQHVSYFDDILQLINDFSKRVILADANLEKINKLYQDNKENISVDELANNIINLFTFTSLGAPAAFKFFDKIVDRKRYTSTKEVLNSTLIHQSITGLYETRIDLGKLGGD

SEQ ID NO: 80 - protein, 1365 aa, Streptococcus agalactiae; identical to SEQ ID NO: 49

SEQ ID NO: 81 - protein, 1365 aa, Streptococcus agalactiae
MNKPYSIGLDIGTNSVGYSVVTDDYKVPAKKMRVLGNTDKEYIKKNLIGALLFDGGNTASDRRLKRTARRRYTRRRNRILYLQEIFAEEMSKVDDSFFHRLEDSFLVEDDKRGSKYPIFATMQEEKDYHEKFPTIYHLRKELADKKEKANLRLVYLALAHIIKFRGHFLIEDDSFDVRNTDIQRQYQAFLEIFDTTFENNHLLSQNIDVEGILTDKISKSAKKDRILAQYPNQKSTGIFAEFLKLIVGNQADFKKHFNLEDKTPLQFAKDSYDEDLENLLGQIGDEFADLFSVAKKLYDSVLLSGILTVTDLSTKAPLSASMIQRYDEHREDLKQLKQFVKASLPEKYQEIFTDSSKDGYAGYIEGKTNQGAFYKYLSKLLTKQEGSEYFLEKIKNEDFLRKQRTFDNGSIPHQVHLTELKAIIRRQSEYYPFLKENLDRIEKILTFRIPYYVGPLAREKSDFAWMTRKTDDSIRPWNFEELVDKEASAEAFIHRMTNNDLYLPEEKVLPKHSLIYEKFTVYNELTKVRYKNEQGETYFFDSNIKQEIFDGVFKEHRKVSKKKLLDFLAKEYEEFRIVDVIGLDKENKAFNASLGTYHDLKKILDKDFLDNPDNESILEDIVQTLTLFEDREMIKKRLENYKDLFTESQLKKLYRRHYTGWGRLSAKLINGIRDKESQKTILDYLISDGRANRNFMQLIHDDGLSFKPIIDKAQAGSHSDNLKEVVGELAGSPAIKKGILQSLKIVDELVKVMGYEPEQVVVEMARENQTTNKGRRNTRQRYKLLEEGVKNLASNILKEYPTDNQALQNERLFLYYLQNGRDMYTGEALDIDNLSQYDIDHIVPQAFIKDDSIDNRVLVSSAKNRGKSDNVPSIDIVKARKAFWKKLLDAKLMSQRKYDNLTKAERGGLTSDDKARFIQRQLVETRQITKHVARILDERFNNELDSKGRRIRKVKIVTLKSNLVSNFRKEFGFYKIREVNDYHHAHDAYLNAVVAKAILTKYPQLEPEFVYGDYPKYNSYKTRKATEKLFFYSNIMNFFKTKVTLADGTVVVKDDIEVNNDTGEIVWDKKKHFATVRKVLSYPQVNIVKKTEIQTGGFSKESILAHGNSDKLIPRKTKDIYLDPKKYGGFDSPIVAYSVLVVADIKKGKAQKLKTVTELLGITIMERFRFEKNPSAFLESKGYLNIRDDKLMILPKYSLFELENGRRRLLASAGELQKGNELALPTQYMKFLYLASRYNELKGKPEEIEQKQEFVVQHVSYFDDILQIINDFSNRVILADANLEKINKLYQDNKENISVDELANNIINLFTFTSLGAPAAFKFFDKIVDRKRYTSTKEVLNSTLIHQSITGLYETRIDLGKLGED

SEQ ID NO: 82 - protein, 1365 aa, Streptococcus agalactiae
MNKPYSIGLDIGTNSVGWSIITDDYKVPAKKMRVLGNTDKEYIKKNLIGALLFDGRNTAADRRLKRTARRRYTRRRNRILYLQEIFAEEMSKVDDSFFHRLEDSFLVEEDKRGSKYPIFATLQEEKDYHEKFSTIYHLRKELADKKEKADLRLIYIALAHIIKFRGHFLIEDDSFDVRNTDISKQYQDFLEIFNTTFENNDLLSQNVDVEAILTDKISKSAKKDRILAQYPNQKSTGIFAEFLKLIVGNQADFKKYFNLEDKTPLQFAKDSYDEDLENLLGQIGDEFADLFSAAKKLYDSVLLSGILTVIDLSTKAPLSASMIQRYDEHREDLKQLKQFVKASLPEKYQEIFADSSKDGYAGYIEGKTNQEAFYKYLSKLLTKQEDSENFLEKIKNEDFLRKQRTFDNGSIPHQVHLTELKAIIRRQSEYYPFLKENQDRIEKILTFRIPYYIGPLAREKSDFAWMTRKTDDSIRPWNFEDLVDKEKSAEAFIHRMTNNDFYLPEEKVLPKHSLIYEKFTVYNELTKVRYKNEQGETYFFDSNIKQEIFDGVFKEHRKVSKKKLLDFLAKEYEEFRIVDVIGLDKENKAFNASLGTYHDLEKILDKDFLDNPDNESILEDIVQTLTLFEDREMIKKRLENYKDLFTESQLKKLYRRHYTGWGRLSAKLINGIRDKESQKTILDYLIDDGRSNRNFMQLINDDGLSFKSIISKAQAGSHSDNLKEVVGELAGSPAIKKGILQSLKIVDELVKVMGYEPEQIVVEMARENQTTNQGRRNSRQRYKLLDDGVKNLASNILKEYPTDNQALQNERLFLYYLQNGRDMYTGEALDIDNLSQYDIDHIIPQAFIKDDSIDNRVLVSSAKNRGKSDDVPSLEIVKDCKVFWKKLLDAKLMSQRKYDNLTKAERGGLTSDDKARFIQRQLVETRQITKHVARILDERFNNELDSKGRRIRKVKIVTLKSNLVSNFRKEFGFYKIREVNNYHHAHDAYLNAVVAKAILTKYPQLEPEFVYGDYPKYNSYKTRKATEKLFFYSNIMNFFKTKVTLADGTVVVKDDIEVNNDTGEIVWDKKKHFATVRKVLSYPQNNIVKKTEIQTGGFSKESILAHGNSDKLIPRKTKDIYLDPKKYGGFDSPIVAYSVLVVADIKKGKAQKLKTVTELLGITIMERSRFEKNPSAFLESKGYLNIRADKLIILPKYSLFELENGRRRLLASAGELQKGNELALPTQFMKFLYLASRYNESKGKPEEIEKKQEFVNQHVSYFDDILQLINDFSKRVILADANLEKINKLYQDNKENISVDELANNIINLFTFTSLGAPAAFKFFDKIVDRKRYTSTKEVLNSTLIHQSITGLYETRIDLGKLGED

SEQ ID NO: 83 - protein, 1365 aa, Streptococcus agalactiae
MNKPYSIGLDIGTNSVGWSIITDDYKVPAKKMRVLGNTDKEYIKKNLIGALLFDGGNTAADRRLKRTARRRYTRRRNRILYLQEIFAEEMSKVDDSFFHRLEDSFLVEEDKRGSKYPIFATMQEEKYYHEKFPTIYHLRKELADKKEKADLRLIYLALAHIIKFRGHFLIEDDSFDVRNTDIQKQYQAFLEIFDTTFENNDLLSQNVDVEAILTDKISKSAKKDRILARYPNQKSTGIFAEFLKLIVGNQADFKKHFNLEDKTPLQFAKDSYDEDLENLLGQIGDEFADLFSAAKKLYDSVLLSGILTVTDLSTKAPLSASMIQRYDEHREDLKQLKQFVKASLPEKYQEIFADSSKDGYAGYIEGKTNQEAFYKYLSKLLTKQEGSEYLLEKIKNEDFLRKQRTFDNGSIPHQVHLTELRAIIRRQSEYYPFLKENLDRIEKILTFRIPYYVGPLAREKSDFAWMTRKTDDSIRPWNFEDLVDKEKSAEAFIHRMTNNDLYLPEEKVLPKHSLIYEKFTVYNELTKVRFLAEGFKDFQFLNRKQKETIFNSLFKEKRKVTEKDIISFLNKVDGYEGIAIKGIEKQFNASLSTYHDLKKILGKDFLDNTDNELILEDIVQTLTLFEDREMIRKRLDIYKDFFTESQLKKLYRRHYTGWGRLSAKLINGIRNKENQKTILDYLIDDGSANRNFMQLIKDAGLSFKPIIDKARTGSHSDNLKEVVGELAGSPAIKKGILQSLKIVDELVKVMGYEPEQIVVEMARENQTTAKGLSRSRQRLTTLRESLANLKSEKKPKYVKDQVENHHLSDDRLFLYYLQNGKDMYTDDELDIDNLSQYDIDHIIPQAFIKDDSIDNRVLVSSAKNRGKSDDVPSVEIVKDCKVFWKKLLDAKLMSQRKYDNLTKAERGGLTSDDKARFIQRQLVETRQITKHVARILDERFNNELDSKGRRIRKVKIVTLKSNLVSNFRKEFGFYKIREVNNYHHAHDAYLNAVVAKAILTKYPQLEPEFVYGDYPKYNSYKTRKATEKLFFYSNIMNFFKTKVTLADGTVVVKDDIEVNNDTGEIVWDKKKHFATVRKVLSYPQVNIVKKTEIQTGGFSKESILAHGNSDKLIPRKTKDIYLDPKKYGGFDSPIVAYSVLVVADIKKGKAQKLKTVTELLGITIMERSRFEKNPSAFLESKGYLNIRDDKLMILPKYSLFELENGRRRLLASAGELQKGNELALPTQFMKFLYLASRYNELKGKPEEIEQKQEFVVQHVSYFDDILQIINDFSNRVILADANLEKINKLYQDNKENIPVDELANNIINLFTFTSLGAPAAFKFFDKIVDRKRYTSTKEVLNSTLIHKSITGLYETRIDLGKLGED

SEQ ID NO: 84 - protein, 1365 aa, Streptococcus agalactiae
MNKPYSIGLDIGTNSVGWSIITDDYKVPAKKMRVLGNTDKEYIKKNLIGALLFDGGNTAADRRLKRTARRRYTRRRNRILYLQEIFAEEMSKVDDSFFHRLEDSFLVEEDKRGSKYPIFATLQEEKDYHEKFSTIYHLRKELADKKEKADLRLIYIALAHIIKFRGHFLIEDDSFDVRNTDISKQYQDFLEIFNTTFENNDLLSQNVDVEAILTDKISKSAKKDRILAQYPNQKSTGIFAEFLKLIVGNQADFKKYFNLEDKTPLQFAKDSYDEDLENLLGQIGDEFADLFSAAKKLYDSVLLSGILTVIDLSTKAPLSASMIQRYDEHREDLKQLKQFVKASLPEKYQEIFADSSKDGYAGYIEGKTNQEAFYKYLSKLLTKQEDSENFLEKIKNEDFLRKQRTFDNGSIPHQVHLTELKAIIRRQSEYYPFLKENQDRIEKILTFRIPYYIGPLAREKSDFAWMTRKTDDSIRPWNFEDLVDKEKSAEAFIHRMTNNDFYLPEEKVLPKHSLIYEKFTVYNELTKVRYKNEQGETYFFDSNIKQEIFDGVFKEHRKVSKKKLLDFLAKEYEEFRIVDVIGLDKENKAFNASLGTYHDLEKILDKDFLDNPDNESILEDIVQTLTLFEDREMIKKRLENYKDLFTESQLKKLYRRHYTGWGRLSAKLINGIRDKESQKTILDYLIDDGRSNRNFMQLINDDGLSFKSIISKAQAGSHSDNLKEVVGELAGSPAIKKGILQSLKIVDELVKVMGYEPEQIVVEMARENQTTNQGRRNSRQRYKLLDDGVKNLASNILKEYPTDNQALQNERLFLYYLQNGRDMYTGEALDIDNLSQYDIDHIIPQAFIKDDSIDNRVLVSSAKNRGKSDDVPSLEIVKDCKVFWKKLLDAKLMSQRKYDNLTKAERGGLTSDDKARFIQRQLVETRQITKHVARILDERFNNELDSKGRRIRKVKIVTLKSNLVSNFRKEFGFYKIREVNNYHHAHDAYLNAVVAKAILTKYPQLEPEFVYGDYPKYNSYKTRKATEKLFFYSNIMNFFKTKVTLADGTVVIKDDIEVNNDTGEIVWDKKKHFATVRKVLSYPQNNIVKKTEIQTGGFSKESILAHGNSDKLIPRKTKDIYLDPKKYGGFDSPIVAYSVLVVADIKKGKAQKLKTVTELLGITIMERSRFEKNPSAFLESKGYLNIRADKLIILPKYSLFELENGRRRLLASAGELQKGNELALPTQFMKFLYLASRYNESKGKPEEIEKKQEFVNQHVSYFDDILQLINDFSKRVILADANLEKINKLYQDNKENISVDELANNIINLFTFTSLGAPAAFKFFDKIVDRKRYTSTKEVLNSTLIHQSITGLYETRIDLGKLGED

SEQ ID NO: 85 - protein, 1365 aa, Streptococcus agalactiae
MNKPYSIGLDIGTNSVGWSIITDDYKVPAKKMRVLGNTDKEYIKKNLIGALLFDGGNTAADRRLKRTARRRYTRRRNRILYLQEIFAEEMSKVDDSFFHRLEDSFLVEEDKRGSKYPIFATLQEEKDYHEKFSTIYHLRKELADKKEKADLRLIYIALAHIIKFRGHFLIEDDSFDVRNTDISKQYQDFLEIFNTTFENNDLLSQNVDVEAILTDKISKSAKKDRILAQYPNQKSTGIFAEFLKLIVGNQADFKKYFNLEDKTPLQFAKDSYDEDLENLLGQIGDEFADLFSAAKKLYDSVLLSGILTVIDLSTKAPLSASMIQRYDEHREDLKQLKQFVKASLPEKYQEIFADSSKDGYAGYIEGKTNQEAFYKYLSKLLTKQEDSENFLEKIKNEDFLRKQRTFDNGSIPHQVHLTELKAIIRRQSEYYPFLKENQDRIEKILTFRIPYYIGPLAREKSDFAWMTRKTDDSIRPWNFEDLVDKEKSAEAFIHRMTNNDFYLPEEKVLPKHSLIYEKFTVYNELTKVRYKNEQGETYFFDSNIKQEIFDGVFKEHRKVSKKKLLDFLAKEYEEFRIVDVIGLDKENKAFNASLGTYHDLEKILDKDFLDNPDNESILEDIVQTLTLFEDREMIKKRLENYKDLFTESQLKKLYRRHYTGWGRLSAKLINGIRDKESQKTILDYLIDDGRSNRNFMQLINDDGLSFKSIISKAQAGSHSDNLKEVVGELAGSPAIKKGILQSLKIVDELVKVMGYEPEQIVVEMARENQTTNQGRRNSRQRYKLLDDGVKNLASNILKEYPTDNQALQNERLFLYYLQNGRDMYTGEALDIDNLSQYDIDHIIPQAFIKDDSIDNRVLVSSAKNRGKSDDVPSLEIVKDCKVFWKKLLDAKLMSQRKYDNLTKAERGGLTSDDKARFIQRQLVETRQITKHVASILDERFNNELDSKGRRIRKVKIVTLKSNLVSNFRKEFGFYKIREVNNYHHAHDAYLNAVVAKAILTKYPQLEPEFVYGDYPKYNSYKTRKATEKLFFYSNIMNFFKTKVTLADGTVVVKDDIEVNNDTGEIVWDKKKHFATVRKVLSYPQNNIVKKTEIQTGGFSKESILAHGNSDKLIPRKTKDIYLDPKKYGGFDSPIVAYSVLVVADIKKGKAQKLKTVTELLGITIMERSRFEKNPSAFLESKGYLNIRADKLIILPKYSLFELENGRRRLLASAGELQKGNELALPTQFMKFLYLASRYNESKGKPEEIEKKQEFVNQHVSYFDDILQLINDFSKRVILADANLEKINKLYQDNKENISVDELANNIINLFTFTSLGAPAAFKFFDKIVDRKRYTSTKEVLNSTLIHQSITGLYETRIDLGKLGED

SEQ ID NO: 86 - protein, 1365 aa, Streptococcus agalactiae
MNKPYSIGLDIGTNSVGYSVVTDDYKVPAKKMRVLGNTDKEYIKKNLIGALLFDGGNTASDRRLKRTARRRYTRRRNRILYLQEIFAEEMSKVDDSFFHRLEDSFLVEDDKRGSKYPIFATMQEEKDYHEKFPTIYHLRKELADKKEKANLRLVYLALAHIIKFRGHFLIEDDSFDVRNTDIQRQYQAFLEIFDTTFENNHLLSQNIDVEGILTDKISKSAKKDRILAQYPNQKSTGIFAEFLKLIVGNQADFKKHFNLEDKTPLQFAKDSYDEDLENLLGQIGDEFADLFSVAKKLYDSVLLSGILTVTDLSTKAPLSASMIQRYDEHREDLKQLKQFVKASLPEKYQEIFTDSSKDGYAGYIESKTNQGAFYKYLSKLLTKQEGSEYFLEKIKNEDFLRKQRTFDNGSIPHQVHLTELKAIIRRQSEYYPFLKENLDRIEKILTFRIPYYVGPLAREKSDFAWMTRKTDDSIRPWNFEELVDKEASAEAFIHRMTNNDLYLPEEKVLPKHSLIYEKFTVYNELTKVRYKNEQGETYFFDSNIKQEIFDGVFKEHRKVSKKKLLDFLAKEYEEFRIVDVIGLDKENKAFNASLGTYHDLKKILDKDFLDNPDNESILEDIVQTLTLFEDREMIKKRLENYKDLFTESQLKKLYRRHYTGWGRLSAKLINGIRDKESQKTILDYLISDGRANRNFMQLIHDDGLSFKPIIDKAQAGSHSDNLKEVVGELAGSPAIKKGILQSLKIVDELVKVMGYEPEQVVVEMARENQTTNQGRRNTRQRYKLLEEGVKNLASNILKEYPTDNQALQNERLFLYYLQNGRDMYTGEALDIDNLSQYDIDHIVPQAFIKDDSIDNRVLVSSAKNRGKSDNVPSIDIVKARKAFWKKLLDAKLMSQRKYDNLTKAERGGLTSDDKARFIQRQLVETRQITKHVARILDERFNNELDSKGRRIRKVKIVTLKSNLVSNFRKEFGFYKIREVNDYHHAHDAYLNAVVAKAILTKYPQLEPEFVYGDYPKYNSYKTRKATEKLFFYSNIMNFFKTKVTLADGTVVVKDDIEVNNDTGEIVWDKKKHFATVRKVLSYPQVNIVKKTEIQTGGFSKESILAHGNSDKLIPRKTKDIYLDPKKYGGFDSPIVAYSVLVVADIKKGKAQKLKTVTELLGITIMERFRFEKNPSAFLESKGYLNIRDDKLMILPKYSLFELENGRRRLLASAGELQKGNELALPTQYMKFLYLASRYNELKGKPEEIEQKQEFVVQHVSYFDDILQIINDFSNRVILADANLEKINKLYQDNKENISVDELANNIINLFTFTSLGAPAAFKFFDKIVDRKRYTSTKEVLNSTLIHQSITGLYETRIDLGKLGED

SEQ ID NO: 87 - protein, 1365 aa, Streptococcus agalactiae
MNKPYSIGLDIGTNSVGWSIITDDYKVPAKKMRVLGNTDKEYIKKNLIGALLFDGGNTAADRRLKRTARRRYTRRRNRILYLQEIFAEEMSKVDDSFFHRLEDSFLVEEDKRGSKYPIFATLQEEKDYHEKFSTIYHLRKELADKKEKADLRLIYIALAHIIKFRGHFLIEDDSFDVRNTDISKQYQDFLEIFNTTFENNDLLSQNVDVEAILTDKISKSAKKDRILAQYPNQKSTGIFAEFLKLIVGNQADFKKYFNLEDKTPLQFAKDSYDEDLENLLGQIGDEFADLFSAAKKLYDSVLLSGILTVIDLSTKAPLSASMIQRYDEHREDLKQLKQFVKASLPEKYQEIFADSSKDGYAGYIEGKTNQEAFYKYLSKLLTKQEDSENFLEKIKNEDFLRKQRTFDNGSIPHQVHLTELKAIIRRQSEYYPFLKENQDRIEKILTFRIPYYIGPLAREKSDFAWMTRKTDDSIRPWNFEDLVDKEKSAEAFIHRMTNNDFYLPEEKVLPKHSLIYEKFTVYNELTKVRYKNEQGETYFFDSNIKQEIFDGVFKEHRKVSKKKLLDFLAKEYEEFRIVDVIGLDKENKAFNASLGTYHDLEKILDKDFLDNPDNESILEDIVQTLTLFEDREMIKKRLENYKDLFTESQLKKLYRRHYTGWGRLSAKLINGIRDKESQKTILDYLIDDGRSNRNFMQLINDDGLSFKSIISKAQAGSHSDNLKEVVGELAGSPAIKKGILQSLKIVDELVKVMGYEPEQIVVEMARENQTTNQGRRNSRQRYKLLDDGVKNLASNILKEYPTDNQALQNERLFLYYLQNGRDMYTGEALDIDNLSQYDIDHIIPQAFIKDDSIDNRVLVSSAKNRGKSDDVPSLEIVKDCKVFWKKLLDAKLMSQRKYDNLTKAERGGLTSDDKARFIQRQLVETRQITKHVARILDERFNNELDSKGRRIRKVKIVTLKSNLVSNFRKEFGFYKIREVNNYHHAHDAYLNAVVAKAILTKYPQLEPEFVYGDYPKYNSYKTRKATEKLFFYSNIMNFFKTKVTLADGTVVVKDDIEVNNDTGEIVWDKKKHFATVRKVLSYPQNNIVKKTEIQTGGFSKESILAHGNSDKLIPRKTKDIYLDPKKYGGFDSPIVAYSVLVVADIKKGKAQKLKTVTELLGITIMERSRFEKNLSAFLESKGYLNIRADKLIILPKYSLFELENGRRRLLASAGELQKGNELALPTQFMKFLYLASRYNESKGKPEEIEKKQEFVNQHVSYFDDILQLINDFSKRVILADANLEKINKLYQDNKENISVDELANNIINLFTFTSLGAPAAFKFFDKIIDRKRYTSTKEVLNSTLIHQSITGLYETRIDLGKLGED

SEQ ID NO: 88 - protein, 1365 aa, Streptococcus agalactiae
MNKPYSIGLDIGTNSVGWSIITDDYKVPAKKMRVLGNTDKEYIKKNLIGALLFDGGNTAADRRLKRTARRRYTRRRNRILYLQEIFAEEMSKVDDSFFHRLEDSFLVEEDKRGSKYPIFATLQEEKDYHEKFSTIYHLRKELADKKEKADLRLIYIALAHIIKFRGHFLIEDDSFDVRNTDISKQYQDFLEIFNTTFENNDLLSQNVDVEAILTDKISKSAKKDRILAQYPNQKSTGIFAEFLKLIVGNQADFKKYFNLEDKTPLQFAKDSYDEDLENLLGQIGDEFADLFSAAKKLYDSVLLSGILTVIDLSTKAPLSASMIQRYDEHREDLKQLKQFVKASLPEKYQEIFADSSKDGYAGYIEGKTNQEAFYKYLSKLLTKQEDSENFLEKIKNEDFLRKQRTFDNGSIPHQVHLTELKDIIRRQSEYYPFLKENQDRIEKILTFRIPYYIGPLAREKSDFAWMTRKTDDSIRPWNFEDLVDKEKSAEAFIHRMTNNDFYLPEEKVLPKHSLIYEKFTVYNELTKVRYKNEQGETYFFDSNIKQEIFDGVFKEHRKVSKKKLLDFLAKEYEEFRIVDVIGLDKENKAFNASLGTYHDLEKILDKDFLDNPDNESILEDIVQTLTLFEDREMIKKRLENYKDLFTESQLKKLYRRHYTGWGRLSAKLINGIRDKESQKTILDYLIDDGRSNRNFMQLINDDGLSFKSIISKAQAGSHSDNLKEVVGELAGSPAIKKGILQSLKIVDELVKVMGYEPEQIVVEMARENQTTNQGRRNSRQRYKLLDDGVKNLASNILKEYPTDNQALQNERLFLYYLQNGRDMYTGEALDIDNLSQYDIDHIIPQAFIKDDSIDNRVLVSSAKNRGKSDDVPSLEIVKDCKVFWKKLLDAKLMSQRKYDNLTKAERGGLTSDDKARFIQRQLVETRQITKHVARILDERFNNELDSKGRRIRKVKIVTLKSNLVSNFRKEFGFYKIREVNNYHHAHDAYLNAVVAKAILTKYPQLEPEFVYGDYPKYNSYKTRKATEKLFFYSNIMNFFKTKVTLADGTVVVKDDIEVNNDTGEIVWDKKKHFATVRKVLSYPQNNIVKKTEIQTGGFSKESILAHGNSDKLIPRKTKDIYLDPKKYGGFDSPIVAYSVLVVADIKKGKAQKLKTVTELLGITIMERSRFEKNPSAFLESKGYLNIRADKLIILPKYSLFELENGRRRLLASAGELQKGNELALPTQFMKFLYLASRYNESKGKPEEIEKKQEFVNQHVSYFDDILQLINDFSKRVILADANLEKINKLYQDNKENISVDELANNIINLFTFTSLGAPAAFKFFDKIVDRKRYTSTKEVLNSTLIHQSITGLYETRIDLGKLGED

SEQ ID NO: 89 - protein, 1365 aa, Streptococcus agalactiae 138P
MNKPYSIGLDIGTNSVGWSIITDDYKVPAKKMRVLGNTDKEYIKKNLIGALLFDGGNTAADRRLKRTARRRYTRRRNRILYLQEIFAEEMSKVDDSFFHRLEDSFLVEEDKRGSKYPIFATMQEEKDYHEKFPTIYHLRKELADKKEKADLRLVYLALAHIIKFRGHFLIEDDRFDVRNTDIQKQYQAFLEIFDTSFENNHLLSQNVDVEAILTDKISKSAKKDRILAQYPNQKSTGIFAEFLKLIVGNQADFKKHFNLEDKTPLQFAKDSYDEDLENLLGQIGDEFADLFSAAKKLYDSVLLSGILTVTDLSTKAPLSASMIQRYDEHREDLKQLKQFVKASLPEKYQEIFADSSKDGYAGYIEGKTNQEAFYKYLSKLLTKQEDSEYFLEKIKNEDFLRKQRTFDNGSIPHQVHLTELKAIIRRQSEYYPFLKENQDKIEKILTFRIPYYVGPLARGNSDFAWMTRKTDDSIRPWNFEDLVDKEKSAEAFIHRMTNNDLYLPEEKVLPKHSLIYEKFTVYNELTKVRYKNEQGETYFFDSNVKQEIFDGVFKEHRKVSKKQLLDFLAKEFEEFRIVDVTGLDKENKAFNASLGTYHDLKKILDKDFLDNPDNESILEDIVQTITLFEDREMIKKRLENYKDLFTESQLKKLYRRHYTGWGRLSAKLINGIRDRESQKIILDYLISDGRANRNFMQLINDDGLSFKSIISKAQSGSHSDNLKEVVGELAGSPAIKKGILQSLKIVDELVKVMGYEPEQIVVEMARENQTTNQGRRNSRQRYKLLEDGVKNLASDILKEYPTDNQALQNERLFLYYLQNGRDMYTGEALDIDSLSQYDIDHIVPQAFIKDDSIDNRVLVSSAKNRGKSDDVPSIDIVKARKAFWKKLLDAKLISQRKYDNLTKAERGGLTPDDKAGFIQRQLVETRQITKHVARILDERFNNKVDDNNKPIRKVKIVTLKSNLVSNFRKEFGFYKIREVNNYHHAHDAYLNAVVAKAILTKYPQLEPEFVYGDYPKYNSYKTRKATEKLFFYSNIMNFFKTKVTLADETVVVKDDIEVNNETGEIAWDKKKHFATVRKVLSYPQVNIVKKTEVQTGGFSKESILAHSNSDKLIPRKTKDIYLDPKKYGGFDSPIVAYSVLVLADIKKGKAQKLKTVKELIGITIMERERFEKNPSAFLESKGYLNIRTDKLIILPKYSLFELENGRRRLLASAGELQKGNELALPTQYMKFLYLASRYNESKGKPEEIEKKQEFVNQHVSYFDDILQLINDFSKRVILADANLEKINKLYSDNKDNTPVDELAKNIINLFTFTSLGAPAAFKFFDKSVDRKRYTSTKEVLDSTLIHQSITGLYETRIDLGKLGED

SEQ ID NO: 90 - protein, 1365 aa, Streptococcus agalactiae H36B
  misc_feature (9)..(9): Xaa can be any naturally occurring amino acid
MNKPYSIGXDIGTNSVGWSIITDDYKVPAKKMRVLGNTDKEYIKKNLIGALLFDGGNTAADRRLKRTARRRYTRRRNRILYLQEIFAEEMSKVDDSFFHRLEDSFLVEEDKRGSKYPIFATLQEEKDYHEKFSTIYHLRKELADKKEKADLRLIYIALAHIIKFRGHFLIEDDSFDVRNTDISKQYQDFLEIFNTTFENNDLLSQNVDVEAILTDKISKSAKKDRILAQYPNQKSTGIFAEFLKLIVGNQADFKKYFNLEDKTPLQFAKDSYDEDLENLLGQIGDEFADLFSAAKKLYDSVLLSGILTVIDLSTKAPLSASMIQRYDEHREDLKQLKQFVKASLPEKYQEIFADSSKDGYAGYIEGKTNQEAFYKYLSKLLTKQEDSENFLEKIKNEDFLRKQRTFDNGSIPHQVHLTELKAIIRRQSEYYPFLKENQDRIEKILTFRIPYYIGPLAREKSDFAWMTRKTDDSIRPWNFEDLVDKEKSAEAFIHRMTNNDFYLPEEKVLPKHSLIYEKFTVYNELTKVRYKNEQGETYFFDSNIKQEIFDGVFKEHRKVSKKKLLDFLAKEYEEFRIVDVIGLDKENKAFNASLGTYHDLEKILDKDFLDNPDNESILEDIVQTLTLFEDREMIKKRLENYKDLFTESQLKKLYRRHYTGWGRLSAKLINGIRDKESQKTILDYLIDDGRSNRNFMQLINDDGLSFKSIISKAQAGSHSDNLKEVVGELAGSPAIKKGILQSLKIVDELVKVMGYEPEQIVVEMARENQTTNQGRRNSRQRYKLLDDGVKNLASNILKEYPTDNQALQNERLFLYYLQNGRDMYTGEALDIDNLSQYDIDHIIPQAFIKDDSIDNRVLVSSAKNRGKSDDVPSLEIVKDCKVFWKKLLDAKLMSQRKYDNLTKAERGGLTSDDKARFIQRQLVETRQITKHVARILDERFNNELDSKGRRIRKVKIVTLKSNLVSNFRKEFGFYKIREVNNYHHAHDAYLNAVVAKAILTKYPQLEPEFVYGDYPKYNSYKTRKATEKLFFYSNIMNFFKTKVTLADGTVVVKDDIEVNNDTGEIVWDKKKHFATVRKVLSYPQNNIVKKTEIQTGGFSKESILAHGNSDKLIPRKTKDIYLDPKKYGGFDSPIVAYSVLVVADIKKGKAQKLKTVTELLGITIMERSRFEKNPSAFLESKGYLNIRADKLIILPKYSLFELENGRRRLLASAGELQKGNELALPTQFMKFLYLASRYNESKGKPEEIEKKQEFVNQHVSYFDDILQLINDFSKRVILADANLEKINKLYQDNKENISVDELANNIINLFTFTSLGAPAAFKFFDKIVDRKRYTSTKEVLNSTLIHQSITGLYETRIDLGKLGED

SEQ ID NO: 91 - protein, 1365 aa, Streptococcus agalactiae ILRI112
MNKPYSIGLDIGTNSVGWSIITDDYKVPAKKMRVLGNTDKEYIKKNLIGALLFDGGNTAADRRLKRIARRRYTRRRNRILYLQEIFAEKMSKVDDSFFHRLEDSFLVEEDKRGSKYPIFATLQEEKDYHEKFPTIYHLRKELADKKEKADLRLVYLALAHIIKFRGHFLIEDDRFDVRNTDIQKQYQAFLEIFDTTFENNHLLSQNVDVEAILTDKISKSAKKDRILAQYPDQKSTGIFAEFLKLIVGNQADFKKHFNLEDKTPLQFAKDSYDEDLENLLGQIGDEFADLFSAAKKLYDSVLLSGILTVTDLSTKAPLSASMIQRYDEHREDLKQLKQFVKASLPEKYQEIFADSSKDGYAGYIEGKTNQEAFYKYLSKLLTKQEGSEYLLEKIKNEDFLRKQRTFDNGSIPHQVHLTELRAIIRRQSEYYPFLKENLDRIEKILTFRIPYYVGPLAREKSDFAWMTRKTDDSIRPWNFEELVDKEASAEAFIHCMTNNDLYLPEEKVLPKHSLIYEKFTVYNELTKVRYKNEQGETYFFDSNIKQEIFDGVFKEYRKVSKKQLLDFLAKEFEEFRIVDVTGLDKENKAFNASLGTYHDLEKILGKDFLDNPDNESILEDIVQTLTLFEDREMIKKRLDIYKDFFTESQLKKLYRRHYTGWGRLSAKLINGIRNKENQKTILDYLIDDGSANRNFMQLIKDAGLSFKSIISKAQSGSHSDNLKEVVSELAGSPAIKKGILQSLKIVDELVKVMGYKPEQIVVEMARENQTTNQGRRNSRQRYKLLDDGVRNLASNILKEYPTDNQALQNERLFLYYLQNGRDMYTEKALDIDNLSQYDIDHIIPQAFIKDDSIDNRVLVSSAKNRGKSDDVPSLEIVKDCKVFWKKLLDAKLMSQRKYDNLTKAERGGLTSDDKARFIQRQLVETRQITKHVARILDERFNNELDSKGRRIRKVKIVTLKSNLVSNFRKEFGFYKIREVNDYHHAHDAYLNAVVAKAILTKYPQLEPEFVYGDYPKYNSYKTRKATEKLFFYSNIMNFFKTKVTLADGTVVVKDDIEVNNDTGEIVWDKKKHFATVRKVLSYPQNNIVKKTEIQTGGFSKESILAHGNSDKLIPRKTKDIYLDPKKYGGFDSPIVAYSVLVVADIKKGKAQKLKTVTELLGITIMERSRFEKNPSAFLESKGYLNIRTDKLIILPKYSLFELENGRRRLLASAGELQKGNELALPTQFMKFLYLASRYNESKGKPEEIEKKQEFVNQHVSYFDDILQIINDFSNRVILADANLEKINKLYQDNKENISVDELANNIINLFTFTSLGAPAAFKFFDKIVDRKRYTSTKEVLNSTLIHQSITGLYETRIDLGKLGED

SEQ ID NO: 92 - protein, 1351 aa, Streptococcus anginosus
MNQKYSIGLDIGTNSVGWAVITDDYKVPAKKMKVLGNTDKQSIKKNLLGALLFDSGETAEATRLKRTARRRYTRRRNRLRYLQEIFAEEMMQVDESFFQRLDDSFLVDEDKRGERHPIFGNIAAEVKYHDEFPTIYHLRKHLADISQKADLRLVYLALAHMIKFRGHFLIEGQLKAENTNVQALFKDFVEVYDKTVEESHLSEITVDALSILTEKVSKSRRLENLIAHYPAEKKNTLFGNLIALFLGLQPNFKTNFQLSEDAKLQFSKDTYEEDLEGLLGEVGDEYADLFASAKNLYDAILLSGILTVDDNSTKAPLSASMVKRYEEHQKDLKKFEDFIKVNALDQYNAIFKDKNKKGYAGYIESGVKQDEFYKYLKGILLQINGSGDFLDKIDREDFLRKQRTFDNGSIPHQIHLQEMHAILRRQGEHYPFLKENQDKIEKILTFRIPYYVGPLARKGSRFAWAEYKADEKITPWNFDDILDKEKSAEKFITRMTLNDLYLPEEKVLPKHSLLYETFTVYNELTKVKYVNEQGEAKFFDANMKQEIFDHVFKENRKVTKDKLLNYLNKEFEEFRIVNLTGLDKENKVFNSSLGTYHDLRKILNKSFLDNKENAQIIEDIIQTLTLFEDREMIRQRLQKYSDIFTKAQLKKLERRHYTGWGRLSYKLINGIRNKENKKTILDYLIDDGYANRNFMQLINDDALSFKEEIAKAQIIGDVDDIANVVHDLPGSPAIKKGILQSVKIVDELVKVMGHNPANIIIEMARENQTTDRGRRNSQQRLKLLQDSLKPVNIKNVENQQLQNDRLFLYYIQNGKDMYTGETLDINNLSQYDIDHIIPQAYIKDDSFDNRVLTSSSENRGKSDNVPSIEVVCARKADWMRLRKAGLISQRKFDNLTKAERGGLTENDKAGFIKRQLVETRQITKHVAQVLDARFNAKHDENKKVIRDVKIITLKSNLVSQFRKDFKFYKVREINDYHHAHDAYLNAVIGTALLKKYPKLASEFVYGEFKKYDVSDKEIGKATAKYFFYSNLMNFFKKEVKFADGTVVERPDIETSEDGEIAWNKQTDFKIVRKVLSYPQVNIVKKTEVQTHGLDRPSPKPKPDSSENLVGVKRNLDPKKYGGYAGISNSYAVLVKAIIEKGVKKKETMVLEFQGISILDRITFEKDKRAFLLGKGYKDIKKIIELPKYSLFELKDGSRRMLASRGEIHKGNELFVPQKFTTLLYHAKRINNPINKDHIEYVKKHRDDFKELLNYVLEFNEKYVGATKNGERLKEAVADFDSKSNEEICTSFLGLFELTSLGSASDFEFLGVKIPRYRDYTPSSLLKDSTLIHQSITGLYETRIDLSKLGED

SEQ ID NO: 93 - protein, 1341 aa, Streptococcus anginosus
MKKEYSIGLDIGTNSVGWAVITDDYKVPAKKMKVLGNTDKQSIKKNLLGALLFDSGETAEATRLKRTARRRYTRRKNRLRYLQEIFTEEMNKVDENFFQRLDDSFLVEEDKQGSKYPIFGTLKEEKEYHKKFKTIYHLREELANSKEKADLRLVYLALAHMIKFRGHFLYEGDLKAENTDVQALFKDFVEEYDKTIEESHLSEITVDALSILTEKVSKSSRLENLIAHYPTEKKNTLFGNLIALSLGLQPNFKTNFQLSEDAKLQFSKDTYEEDLEELLGEIGDEYADLFASAKNLYDAILLSGILAVDDNTTKAPLSASMVKRYEEHQKDLKKLKDFIKVNAPDQYNAIFKDKNKKGYAGYIESGVEQDEFYKYLKGILLKINGSGDFLDKIDCEDFLRKQRTFDNGSIPHQIHLQEMHAILRRQGEHYPFLKENQDKIEKILTFRIPYYVGPLARKGSRFAWAEYKADEKITPWNFDDILDKEKSAEKFITRMTLNDLYLPEEKVLPKHSPLYETFTVYNELTKVKYVNEQGEAKFFDTNMKQEIFDHVFKENRKVTKDKLLNYLNKEFEEFRIVNLTGLDKENKAFNSSLGTYHDLRKILDKSFLDDKANEKTIEDIIQTLTLFEDREMIRQRLQKYSDIFTKAQLKKLERRHYTGWGRLSYKLINGIRNKENKKTILDYLIDDGYANRNFMQLINDDALSFKEEIARAQIIGDVDDIANVVHDLPGSPAIKKGILQSVKIVDELVKVMGHNPANIIIEMARENQTTDKGRRNSQQRLKLLQDSLKPVNIKNVENQQLQNDRLFLYYIQNGKDMYTGETLDINNLSQYDIDHIIPQAFIKDNSLDNRVLTRSDKNRGKSDDVPSIEVVHEMKSFWSKLLSVKLITQRKFDNLTKAERGGLTEEDKAGFIKRQLVETRQITKHVAQILDERFNTEFDGAQRRIRNVKIITLKSNLVSNFRKEFELYKVREINDYHHAHDAYLNAVVGNALLLKYPQLEPEFVYGEYPKYNSYRSRKSATEKFLFYSNILRFFKKEDIQTNEDGEIAWNKEKHIKILRKVLSYPQVNIVKKTEEQTGGFSKESILPKGESDKLIPRKTKNSYWNPKKYGGFDSPVVAYSILVFADVEKGKSKKLRKVQDMVGITIMEKKRFEKNPVDFLEQRGYRNVRLEKIIKLPKYSLFELENKRRRLLASARELQKGNELVIPQRFTTLLYHSYQIEKNYEPEHREYVEKHKDEFKELLEYISVFSRKYVLADNNLTKIEMLFSKNKDAEVSSLAKSFISLLTFTAFGAPAAFNFFGENIDRKRYTSVTECLNATLIHQSITGLYETRIDLSKLGED

SEQ ID NO: 94 - protein, 1341 aa, Streptococcus anginosus
MKKEYSIGLDIGTNSVGWAVITDDYKVPAKKMKVLGNTDKQSIKKNLLGALLFDSGETAEATRLKRTARRRYTRRRNRLRYLQEIFAEEMMQVDESFFQRLDDSFLVEEDKRGSRYPIFGNIAAEVKYHDDFPTIYHLRKHLVDISQKADLRLVYLALAHMIKFRGHFLIEGQLKAENTNVQALFKDFVEVYDKTVEESHLSEMTVDALSILTEKVSKSRRLENLVECYPTEKKNTLFGNLIALSLGLQPNFKTNFQLSEDAKLQFSKDTYEEDLEGLLGEIGDEYADLFASAKNLYDAILLSGILAVDDNTTKAPLSASMVKRYEEHQKDLKKLKDFIKVNAPAQYDDIFKDETKNGYAGYIENGVKQDEFYKYLKNTLSKIDGSDYFLDKIDREDFLRKQRTFDNGSIPHQIHLQEMHAILRRQGEHYPFLKENQDKIEKILTFRIPYYVGPLARKGSRFAWAEYKADEKITPWNFDDILDKEKSAEKFITRMTLNDLYLPEEKVLPKHSPLYETFTVYNELTKVKYVNEQGEAKFFDTNMKQEIFDHVFKENRKVTKDKLLNYLNKEFEEFRIVNLTGLDKENKAFNASLGTYHDLRKILDKSFLDDKVNEKIIEDIIQTLTLFEDREMIRQRLQKYSDIFTTQQLKKLERRHYTGWGRLSYKLINGIRNKENKKTILDYLIDDGYANRNFMQLINDDALSFKEEIARAQIIGDVDDIANVVHDLPGSPAIKKGILQSVKIVDELVKVMGHNPANIIIEMARENQTTDKGRRNSQQRLKLLQDSLKPVNIKNVENQQLQNDRLFLYYIQNGKDMYTGETLDINNLSQYDIDHIIPQAFIKDNSLDNRVLTRSDKNRGKSDDVPSIEVVHEMKSFWSKLLSVKLITQRKFDNLTKAERGGLTEEDKAGFIKRQLVETRQITKHVAQILDERFNTEFDGAQRRIRNVKIITLKSNLVSNFRKEFELYKVREINDYHHAHDAYLNAVVGNALLLKYPQLEPEFVYGEYPKYNSYRSRKSATEKFLFYSNILRFFKKEDIQTNEDGEIAWNKEKHIKILRKVLSYPQVNIVKKTEEQTGGFSKESILPKGESDKLIPRKTKNSYWNPKKYGGFDSPVVAYSILVFADVEKGKSKKLRKVQDMVGITIMEKKRFEKHPVDFLEQRGYRNVRLEKIIKLPKYSLFELENKRRRLLASARELQKGNELVIPQRFTTLLYHSYRIEKDYEPEHREYVEKHKDEFKELLEYISVFSRKYVLADNNLTKIEMLFSKNKDAEVSSLAKSFISLLTFTAFGAPAAFNFFGENIDRKRYTSVTECLNATLIHQSITGLYETRIDLSKLGED

SEQ ID NO: 95 - protein, 1341 aa, Streptococcus anginosus T5; identical to SEQ ID NO: 93

SEQ ID NO: 96 - protein, 1360 aa, Streptococcus caballi
MTKKNYSIGLDIGTNSVGWAVITDDYKVPAKKMKVLGNTDKKYIKKNLLGALLFDSGETAEATRLKRTARRRYTRRKNRLRYLQDIFTEEMAKVDDSFFQRLDESFLTDNDKNFDSHPIFGNKAEEDAYHQKFPTIYHLRKHLADSTEKADLRLVYLALAHMIKFRGHFLIEGELNAENTDVQKLFTDFVGVYDRTFDDSHLSEITVDAASILTEKISKSRRLENLINNYPKEKKNTLFGNLIALALGLQPNFKTNFKLSEDAKLQFSKDTYEEDLEELLGKIGDDYADLFTSSKNLYDAILLSGILTVDDNSTKAPLSASMIKRYVEHHEDLEKLKEFIKANKSELYHDIFKDKTQNGYAGYIENGVKQDEFYKYLKGILTKINGSDYFLDKIEREDFLRKQRTFDNGSIPHQIHLQEMHAILRRQGDYYPFLKENQEEIEKILTFRIPYYVGPLARKDSRFAWAEYRSDEKITPWNFDKVIDKEKSAEKFITRMTLNDLYLPEEKVLPKHSHVYETFAVYNELTKVKYVNEQGKDSFFDSNMKQEIFDHVFKENRKVTKEKLLNYLDKEFPEYRIQDLVGLDKENKSFNASLGTYHDLKKILDKSFLDDKVNEEVIEDIIKTLTLFEDREMIQQRLQKYSDIFTKQQLKKLERRHYTGWGRLSYKLINGIRNKENNKTILDYLIDDGSANRNFMQLINDDALSFKQIIQEAQVVGDVDDIETVVHDLPGSPAIKKGILQSVKIVDELIKVMGDNPDNIVIEMARENQTTNRGRSQSQQRLKKLQNSLKPSYIEDKVENSHLQNDQLFLYYIQNGKDMYTGDELDIDHLSDYDIDHIIPQAFIKDDSIDNRVLTSSAKNRGKSDDVPSLGIVRARKAEWVRLYKSGLISKRKFDNLTKAERGGLTEADKAGFIKRQLVETRQITKHVAQILDARFNTERDENDKVIRDVKVITLKSNLVSQFRKEFKFYKVREINDYHHAHDAYLNAVVGTALLKKYPKLAPEFVYGEYKKYDVSSDDHSEMGKATAKYFFYSNLMNFFKRVIRYSNGKVIVRPVVEYSKDTGEIAWNKRTDFEKVRKVLSYPQVNIVKKVETQTGGFSKESILPKGDSDKLIPRKTKKVLWEPKKYGGFDSPTVAYSVLVVADVEKGKTKKLKTVKELVGISIMERSFFEKNPVEFLKNKGYQNVQEDKLMKLPKYSLFEFEGGRRRLLASATELQKGNEIMLSAHLVALLYHAHRIGNFNSAEHLKYVSEHKKEFEEVLSCVENFANVYVDVEKNLSKIRAAADSMDNFSIEEISDSFINLLTLTALGAPADFNFLGEKIPRKRYNSTKECLNATLIHQSITGLYETRIDLSKLGEE

SEQ ID NO: 97 - protein, 1355 aa, Streptococcus canis
MEKKYSIGLDIGTNSVGWAVITDDYKVPSKKFKVLGNTNRKSIKKNLMGALLFDSGETAEATRLKRTARRRYTRRKNRIRYLQEIFANEMAKLDDSFFQRLEESFLVEEDKKNERHPIFGNLADEVAYHRNYPTIYHLRKKLADSPEKADLRLIYLALAHIIKFRGHFLIEGKLNAENSDVAKLFYQLIQTYNQLFEESLDEIEVDAKGILSARLSKSKRLEKLIAVFPNEKKNGLFGNIIALALGLTPNFKSNFDLTEDAKLQLSKDTYDDDLDELLGQIGDQYADLFSAAKNLSDAILLSDILRSNSEVTKAPLSASMVKRYDEHHQDLALLKTLVRQQFPEKYAEIFKDDTKNGYAGYVGIGATQEEFYKFIKPILEKMDGAEELLAKLNRDDLLRKQRTFDNGSIPHQIHLKELHAILRRQEEFYPFLKENREKIEKILTFRIPYYVGPLARGNSRFAWLTRKSEEAITPWNFEEVVDKGASAQSFIERMTNFDEQLPNKKVLPKHSLLYEYFTVYNELTKVKYVTERMRKPEFLSGEQKKAIVDLLFKTNRKVTVKQLKEDYFKKIECFDSVEIIGVEDRFNASLGTYHDLLKIIKDKDFLDNEENEDILEDIVLTLTLFEDREMIEERLKTYAHLFDDKVMKQLKRRHYTGWGRLSRKMINGIRDKQSGKTILDFLKDGFSNRNFMQLIHDDSLTFKEEIEKAQVSGQGDSLHEQIADLAGSPAIKKGILQTVKIVDELVKVMGHKPENIVIEMARENQTTTKGLQQSRERKKRIEEGIKELESQILKENPVENTQLQNEKLYLYYLQNGRDMYVDQELDINRLSDYDVDHIVPQSFIKDDSIDNKVLTRSVENRGKSDNVPSEEVVKKMKNYWRQLLNAKLITQRKFDNLTKAERGGLSEADKAGFIKRQLVETRQITKHVARILDSRMNTKRDKNDKPIREVKVITLKSKLVSDFRKDFQLYKVRDINNYHHAHDAYLNAVVGTALIKKYPKLESEFVYGDYKVYDVSEQEIGKATAKRFFYSNIMNFFKTEVKLANGEIRKRPLIETNGETGEVVWNKEKDFATVRKVLAMPQVNIVKKTEVQTGGFSKESILSKRESAKLIPRKKGWDTRKYGGFGSPTVAYSILVVAKVEKGKAKKLKSVKVLVGITIMEKGSYEKDPIGFLEAKGYKDIKKELIFKLPKYSLFELENGRRRMLASELQKANELVLPQHLVRLLYYTQNISATTGSNNLGYIEQHREEFKEIFEKIIDFSEKYILKNKVNSNLKSSFDEQFAVSDSILLSNSFVSLLKYTSFGASGGFTFLDLDVKQGRLRYQTVTEVLDATLIYQSITGLYETRTDLSQLGGD

SEQ ID NO: 98 - protein, 1341 aa, Streptococcus constellatus
MGKPYSIGLDIGTNSVGWAVVTDDYKVPAKKMKVLGNTDKQSIKKNLLGALLFDSGETAEATRLKRTARRRYTRRKNRLRYLQEIFTGEMNKVDENFFQRLDDSFLVDEDKRGEHHPIFGNIAAEVKYHDDFPTIYHLRRHLADTSKKADLRLVYLALAHMIKFRGHFLYEGDLKAENTDVQALFKDFVEEYDKTIEESHLSEITVDALSILTEKVSKSSRLENLIAHYPTEKKNTLFGNLIALSLDLHPNFKTNFQLSEDAKLQFSKDTYEEDLEGFLGEVGDEYADLFASAKNLYDAILLSGILTVDDNSTKAPLSASMVKRYEEHQKDLKKLKDFIKVNAPDQYNAIFKDKNKKGYASYIESGVKQDEFYKYLKGILLKINGSGDFLDKIDREDFLRKQRTFDNGSIPHQIHLQEMHAILRRQGEHYPFLKENQDKIEKILTFRIPYYVGPLARKGSRFAWAEYKADEKITPWNFDDILDKEKSAEKFITRMTLNDLYLPEEKVLPKHSPLYEAFTVYNELTKVKYVNEQGEAKFFDTNMKQEIFDHVFKENRKVTKDKLLNYLNKEFEEFRIVNLTGLDKENKAFNSSLGTYHDLRKILDKSFLDDKANEKTIEDIIQTLTLFEDREMIRQRLQKYSDIFTKAQLKKLERRHYTGWGRLSYKLINGIRNKENKKTILDYLIDDGYANRNFMQLINDDALSFKEEIARAQIIDDVDDIANVVHDLPGSPAIKKGILQSVKIVDELVKVMGHNPANIIIEMARENQTTDKGRRNSQQRLKLLQDSLKPVNIKNVENQQLQNDRLFLYYIQNGKDMYTGETLDINNLSQYDIDHIIPQAFIKDNSLDNRVLTRSDKNRGKSDDVPSIEVVHEMKSFWSKLLSVKLITQRKFDNLTKAERGGLTEEDKAGFIKRQLVETRQITKHVAQILDERFNTEFDGNKRRIRNVKIITLKSNLVSNFRKEFELYKVREINDYHHAHDAYLNAVVGNALLLKYPQLEPEFVYGEYPKYNSYRSRKSATEKFLFYSNILRFFKKEDIQTNEDGEIAWNKEKHIKILRKVLSYPQVNIVKKTEEQTGGFSKESILPKGESDKLIPRKTKNSYWDPKKYGGFDSPVVAYSILVFADVEKGKSKKLRKVQDMVGITIMEKKRFEKNPVDFLEQRGYRNVRLEKIIKLPKYSLFELENKRRRLLASAKELQKGNELVIPQRFTTLLYHSYRIEKDYEPEHREYVEKHKDEFKELLEYISVFSRKYVLADNNLTKIEMLFSKNKDAEVSSLAKSFISLLTFTAFGAPAAFNFFGENIDRKRYTSVTECLNATLIHQSITGLYETRIDLSKLGED

SEQ ID NO: 99 - protein, 1355 aa, Streptococcus constellatus
MTQKYSIGLDIGTNSVGWAIVTDDYKVPAKKMKILGNTNKQYIKKNLLGALLFDSGETAKATRLKRTARRRYTRRKNRLRYLQEIFIEEMNKVDENFFQRLDDSFLVTEDKRGSKYPIFGTLKEEKEYYKEFETIYHLRKRLADSTGKVDLRLVYLALAHMIKFRGHFLIEGQLKAENTDVQTLFNDFVEVYDKTIEESHLAEITVDALSILTEKVSKSRRLENLVKCYPTEKKNTLFGNLIALSLGLQPNFKTNFQLSEDAKLQFSKDTYEEDLEELLGKIGDDYADLFTSAKNLYDTILLSGILAVDDNSTKALLSASMIKRYEEHQKDLKKLKDFIKVNAPAQYDDIFKDETKNGYAGYIENGVKQDEFYKYLKNTLSKIDGSGYFLDKIEREDFLRKQRTFDNGSIPHQIHLQEMHAILRRQGEHYPFLKENQDKIEKILTFRIPYYVGPLVRKGSRFAWAEYKADEKITPWNFDDILDKEKSAEKFITRMTLNDLYLPEEKVLPKHSLLYEIFTVYNELTKVKYVNEQGEAKFFDANMKQEIFDHVFKENPKVTKDKLLNYLDKEFDEFRIVDLTGLDKENKAFNASLGTYHDLRKILDKSFLDDKANEKTIEDIIQTLTLFEDREMIRQRLQKYSDIFTKAQLKKLERRHYTGWGRLSYKLINGIRNKENNKTILEYLVDDGYANRNFMQLINDDTLPFKQIIKDAQAIDDVDDIELIVHDLPGSPAIKKGILQSIKIVDELVKVMGYNPDNIVIEMARENQTTTKGRRNSQQRLKLLQDSLTPVSIKNVENQQLQNDRLFLYYIQNGKDMYTGEELDIHHLSDYDIDHIIPQAFIKDDSIDNRVLTSSAKNRGKSDNVPNLEVVCDRKADWIRLREAGLISQRKFDNLTKAERGGLTENDKAGFIHRQLVETRQITKHVAQILDARFNPKRDDNKKVIRDVKIITLKSNLVSQFRRDFKLYKVREINDYHHAHDAYLNAVVGTALLKKYPKLTSEFVYGEYKKYDVSDNDEIGKATAKYFFYSNLMNFFKTEVKFADGTVVERPDIETSEDGEIAWNKQTDFKIVRKVLSYPQVNIVKKVEKQTGRFSKESILPKGDSDKLIARKTKENYWDTKKYGGFDSPTVAYSVLVVADIKKGKAKKLKTVKELVGISIMERPFFEKNPIMFLESKGYRNIQKDKLIKLPKYSLFEFEGGRRRLLASAVELQKGNEMVLPQYLNNLLYHAHRIDNSDNSEHLKYITEHKEEFGKLLSYIENFAKSYVDVDKNLEKIQLAVEKIDSFSVKEISNSFIHLLTLTALGAPADFNFLGEKIPRKRYTSTKECLNATLIHQSITGLYETQTDLSKLGED

SEQ ID NO: 100 - protein, 1356 aa, Streptococcus dysgalactiae
MDKKYSIGLDIGTNSVGWAVITDDYKVPSKKFKVLGNTDRHSIKKNLIGALLFDSGETAEATRLKRTARRRYTRRKNRIRYLQEIFSSEMSKVDDSFFHRLEESFLVEEDKKHERHPIFGNIVDEVAYHEKYPTIYHLRKKLADSTDKADLRLIYLALAHMIKFRGHFLIEGDLNPDNSDMDKLFIQLVQTYNQLFEENINASRVDAKAILSARLSKSRRLENLIAQLPGEKRNGLFGNLIALSLGLTPNFKSNFDLAEDAKLQLSKDTYDDDLDNLLAQIGDQYADLFLAAKNLSDAILLSDILRVNSEITKAPLSASMIKRYDEHHQDLTLLKALVRQQLPEKYKEIFFDQSKNGYAGYIDGGASQEEFYKFIKPILEKMDGTEELLAKLNREDLLRKQRTFDNGSIPHQIHLGELHAILRRQEDFYPFLKDNREKIEKILTFRIPYYVGPLARGNSRFAWMTRKSEETITPWNFEEVVDKGASAQSFIERMTNFDKNLPNEKVLPKHSLLYEYFTVYNELTKVKYVTEGMRKPEFLSGKQKEAIVDLLFKTNRKVTVKQLKEDYFKKIECFDSVEISGVEDRFNASLGTYHDLLKIIKDKDFLDNEENEDILEDIVLTLTLFEDKEMIEERLKKYANLFDDKVMKQLKRRHYTGWGRLSRKLINGIRDKQSGKTILDFLKDGFANRNFMQLINDDSLTFKEAIQKAQVSGQGHSLHEQIANLAGSPAIKKGILQSVKVVDELVKVMGHKPENIVIEMARENQTTQKGQKNSRERMKRIEEGIKELGSQILKEHPVENTQLQNEKLYLYYLQNGRDMYVDQELDINRLSDYDVDHIVPQSFIKDDSIDNKILTRSDKNRGKSDNVPSEEVVKKMKNYWRQLLNAKLITQRKFDNLTKAERGGLSELDKAGFIKRQLVETRQITKHVAQILDSRMNTKYDENDKLIREVKVITLKSKLVSDFRKDFQFYKVREINNYHHAHDAYLNAVVGTALIKKYTKLESEFVYGDYKVYDVSEQEIGKATAKRFFYSNIMNFFKTEITLANGEIRKRPLIETNEETGEIVWDKGRDFATVRKVLSMPQVNIVKKTEVQTGALTNESIYARGSFDKLISRKHRFESSKYGGFGSPTVTYSVLVVAKSKVQDGKVKKIKTGKELIGMTLLDKLVFEKNPLKFIEDKGYGNVQIDKCIKLPKYSLFEFENGTRRMLASRGDLQKANEMFLPAKLVTLLYHAHKIESSKELEHEAYILDHYNDLYQLLSYIERFASLYVDVEKNISKVKELFSNIESYSISEICSSVINLLTLTASGAPADFKFLGTTIPRKRYGSPQSILSSTLIHQSITGLYETRIDLSQLGGD

SEQ ID NO: 101 - protein, 1356 aa, Streptococcus dysgalactiae
MDKKYSIGLDIGTNSVGWAVITDDYKVPSKKFKVLGNTDRHSIKKNLIGALLFDSGETAEATRLKRTARRRYTRRKNRIRYLQEIFSSEMSKVDDSFFHRLEESFLVEEDKKHERHPIFGNIVDEVAYHEKYPTIYHLRKKLADSTDKADLRLIYLALAHMIKFRGHFLIEGDLNPDNSDVDKLFIQLVQTYNQLFEEKINASGVDAKAILSARLSKSKRLENLIAQLPGEKKNGLFGNLIALSLGLTPNFKSNFDLAEDAKLQLSKDTYDDDLDNLLAQIGNQYADLFLAAKNLSDAILLSDILRVNSEITKAPLSASMIKRYDEHHQDLTLLKALVRQQLPEKYKEIFFDQSKNGYAGYIDGGASQEEFYKFIKPILEKMDGTEELLAKLNREDLLRKQRTFDNGSIPHQIHLGELHAILRRQEDFYPFLKDNREKIEKILTFRIPYYVGPLARGNSRFAWMTRKSEETITPWNFEEVVDKGASAQSFIERMTNFDKNLPNEKVLPKHSLLYEYFTVYNELTKVKYVTEGMRKPEFLSGKQKEAIVDLLFKTNRKVTVKQLKEDYFKKIECFDSVEISGVEDRFNASLGTYHDLLKIIKDKDFLDNEENEDILEDIVLTLTLFEDKEMIEERLKKYANLFDDKVMKQLKRRHYTGWGRLSRKLINGIRDKQSGKTILDFLKDGFANRNFMQLINDDSLTFKEAIQKAQVSGQGHSLHEQIANLAGSPAIKKGILQSVKVVDELVKVMGHKPENIVIEMARENQTTQKGQKNSRERMKRIEEGIKELGSQILKEHPVENTQLQNEKLYLYYLQNGRDMYVDQELDINRLSDYDVDHIVPQSFIKDDSIDNKVLTRSDKNRGKSDNVPSEEVVKKMKNYWRQLLNAKLITQRKFDNLTKAERGGLSELDKAGFIKRQLVETRQITKHVAQILDSRMNTKYDENDKLIREVKVITLKSKLVSDFRKDFQFYKVREINNYHHAHDAYLNAVVGTALIKKYPKLESEFVYGDYKVYDVSEQEIGKATAKRFFYSNIMNFFKTEITLANGEIRKRPLIETNEETGEIVWDKGRDFATVRKVLSMPQVNIVKKTEVQTGALTNESIYARGSFDKLISRKHRFESSKYGGFGSPTVTYSVLVVAKSKVQDGKVKKIKTGKELIGITLLDKLVFEKNPLKFIEDKGYGNVQIDKCIKLPKYSLFEFENGTRRMLASRGDLQKANEMFLPAKLVTLLYHAHKIESSKELEHEAYILDHYNDLYQLLSYIERFASLYVDVEKNISKVKELFSNIESYSISEICSSVINLLTLTASGAPADFKFLGTTIPRKRYGSPQSILSSTLIHQSITGLYETRIDLSQLGGD

SEQ ID NO: 102 - protein, 1356 aa, Streptococcus dysgalactiae
MDKKYSIGLDIGTNSVGWAVITDDYKVPSKKFKVLGNTDRHSIKKNLIGALLFDSGETAEATRLKRTARRRYTRRKNRIRYLQEIFSSEMSKVDDSFFHRLEESFLVEEDKKHERHPIFGNIVDEVAYHEKYPTIYHLRKKLADSTDKADLRLIYLALAHMIKFRGHFLIEGDLNPDNSDMDKLFIQLVQTYNQLFEENINASRVDAKAILSARLSKSRRLENLIAQLPGEKRNGLFGNLIALSLGLTPNFKSNFDLAEDAKLQLSKDTYDDDLDNLLAQIGDQYADLFLAAKNLSDAILLSDILRVNSEITKAPLSASMIKRYDEHHQDLTLLKALVRQQLPEKYKEIFFDQSKNGYAGYIDGGASQEEFYKFIKPILEKMDGTEELLAKLNREDLLRKQRTFDNGSIPHQIHLGELHAILRRQEDFYPFLKDNREKIEKILTFRIPYYVGPLARGNSRFAWMTRKSEETITPWNFEEVVDKGASAQSFIERMTNFDKNLPNEKVLPKHSLLYEYFTVYNELTKVKYVTEGMRKPEFLSGKQKEAIVDLLFKTNRKVTVKQLKEDYFKKIECFDSVEISGVEDRFNASLGTYHDLLKIIKDKDFLDNEENEDILEDIVLTLTLFEDKEMIEERLKTYAHLFDDKVMKQLKRRHYTGWGRLSRKLINGIRDKQSGKTILDFLKDGFANRNFIQLIHDDSLTFKEAIQKAQVSGQGHSLHEQIANLAGSPAIKKGILQSVKVVDELVKVMGHKPENIVIEMARENQTTQKGQKNSRERMKRIEEGIKELGSQILKEHPVENTQLQNEKLYLYYLQNGRDMYVDQELDINRLSDYDVDHIVPQSFIKDDSIDNKVLTRSDKNRGKSDDVPSEEVVKKMKNYWRQLLNAKLITQRKFDNLTKAERGGLSELDKAGFIKRQLVETRQITKHVAQILDSRMNTKYDENDKLIREVKVITLKSKLVSDFRKDFQFYKVREINNYHHAHDAYLNAVVGTALIKKYPKLESEFVYGDYKVYDVSEQEIGKATAKRFFYSNIMNFFKTEITLANGEIRKRPLIETNEETGEIVWNKGRDFATVRKVLSMPQVNIVKKTEVQTGALTNESIYARGSFDKLISRKHRFESSKYGGFGSPTVTYSVLVVAKSKVQDGKVKKIKTGKELIGITLLDKLVFEKNPLKFIEDKGYGNVQIDKCIKLPKYSLFEFENGTRRMLASRGDLQKANEMFLPAKLVTLLYHAHKIESSKELEHEAYILDHYNDLYQLLSYIERFASLYVDVEKNISKVKELFSNIESYSISEICSSVINLLTLTASGAPADFKFLGTTIPRKRYGSPQSILSSTLIHQSITGLYETRIDLSQLGGD

SEQ ID NO: 103 - protein, 1356 aa, Streptococcus dysgalactiae
MDKKYSIGLDIGTNSVGWAVITDDYKVPSKKFKVLGNTDRHSIKKNLIGALLFDSGETAEATRLKRTARRRYTRRKNRIRYLQEIFSSEMSKVDDSFFHRLEESFLVEEDKKHERHPIFGNIVDEVAYHEKYPTIYHLRKKLADSTDKADLRLIYLALAHMIKFRGHFLIEGDLNPDNSDMDKLFIQLVQTYNQLFEENINASRVDAKAILSARLSKSRRLENLIAQLPGEKRNGLFGNLIALSLGLTPNFKSNFDLAEDAKLQLSKDTYDDDLDNLLAQIGDQYADLFLAAKNLSDAILLSDILRVNSEITKAPLSASMIKRYDEHHQDLTLLKALVRQQLPEKYKEIFFDQSKNGYAGYIDGGASQEEFYKFIKPILEKMDGTEELLAKLNREDLLRKQRTFDNGSIPHQIHLGELHAILRRQEDFYPFLKDNREKIEKILTFRIPYYVGPLARGNSRFAWMTRKSEETITPWNFEEVVDKGASAQSFIERMTNFDKNLPNEKVLPKHSLLYEYFTVYNELTKVKYVTEGMRKPEFLSGKQKEAIVDLLFKTNRKVTVKQLKEDYFKKIECFDSVEISGVEDRFNASLGTYHDLLKIIKDKDFLDNEENEDILEDIVLTLTLFEDKEMIEERLKKYANLFDDKVMKQLKRRHYTGWGRLSRKLINGIRDKQSGKTILDFLKDGFANRNFMQLINDDSLTFKEAIQKAQVSGQGHSLHEQIANLAGSPAIKKGILQSVKVVDELVKVMGHKPENIVIEMARENQTTQKGQKNSRERMKRIEEGIKELGSQILKEHPVENTQLQNEKLYLYYLQNGRDMYVDQELDINRLSDYDVDHIVPQSFIKDDSIDNKVLTRSDKNRGKSDNVPSEEVVKKMKNYWRQLLNAKLITQRKFDNLTKAERGGLSELDKAGFIKRQLVETRQITKHVAQILDSRMNTKYDENDKLIREVKVITLKSKLVSDFRKDFQFYKVREINNYHHAHDAYLNAVVGTALIKKYPKLESEFVYGDYKVYDVSEQEIGKATAKRFFYSNIMNFFKTEITLANGEIRKRPLIETNEETGEIVWDKGRDFATVRKVLSMPQVNIVKKTEVQTGALTNESIYARGSFDKLISRKHRFESSKYGGFGSPTVTYSVLVVAKSKVQDGKVKKIKTGKELIGITLLDKLVFEKNPLKFIEDKGYGNVQIDKCIKLPKYSLFEFENGTRRMLASRGDLQKANEMFLPAKLVTLLYHAHKIESSKELEHEAYILDHYNDLYQLLSYIERFASLYVDVEKNISKVKELFSNIESYSISEICSSVINLLTLTASGAPADFKFLGTTIPRKRYGSPQSILSSTLIHQSITGLYETRIDLSQLGGD

SEQ ID NO: 104 - protein, 1356 aa, Streptococcus dysgalactiae
MDKKYSIGLDIGTNSVGWAVITDDYKVPSKKFKVLGNTDRHSIKKNLIGALLFDSGETAEATRLKRTARRRYTRRKNRIRYLQEIFSSEMSKVDDSFFHRLEESFLVEEDKKHERHPIFGNIVDEVAYHEKYPTIYHLRKKLADSTDKADLRLIYLALAHMIKFRGHFLIEGDLNPDNSDMDKLFIQLVQTYNQLFEENINASRVDAKAILSARLSKSRRLENLIAQLPGEKRNGLFGNLIALSLGLTPNFKSNFDLAEDAKLQLSKDTYDDDLDNLLAQIGDQYADLFLAAKNLSDAILLSDILRVNSEITKAPLSASMIKRYDEHHQDLTLLKALVRQQLPEKYKEIFFDQSKNGYAGYIDGGASQEEFYKFIKPILEKMDGTEELLAKLNREDLLRKQRTFDNGSIPHQIHLGELHAILRRQEDFYPFLKDNREKIEKILTFRIPYYVGPLARGNSRFAWMTRKSEETITPWNFEEVVDKGASAQSFIERMTNFDKNLPNEKVLPKHSLLYEYFTVYNELTKVKYVTEGMRKPEFLSGKQKEAIVDLLFKTNRKVTVKQLKEDYFKKIECFDSVEISGVEDRFNASLGTYHDLLKIIKDKDFLDNEENEDILEDIVLTLTLFEDKEMIEERLKTYAHLFDDKVMKQLKRRHYTGWGRLSRKLINGIRDKQSGKTILDFLKDGFANRNFIQLIHDDSLTFKEAIQKAQVSGQGHSLHEQIANLAGSPAIKKGILQSVKVVDELVKVMGHKPENIVIEMARENQTTQKGQKNSRERMKRIEEGIKELGSQILKEHPVENTQLQNEKLYLYYLQNGRDMYVDQELDINRLSDYDVDHIVPQSFIKDDSIDNKVLTRSDKNRGKSDDVPSEEVVKKMKNYWRQLLNAKLITQRKFDNLTKAERGGLSELDKAGFIKRQLVETRQITKHVAQILDSRMNTKYDENDKLIREVKVITLKSKLVSDFRKDFQFYKVREINNYHHAHDAYLNAVVGTALIKKYPKLESEFVYGDYKVYDVSEQEIGKATAKRFFYSNIMNFFKTEITLANGEIRKRPLIETNEETGEIVWDKGRDFATVRKVLSMPQVNIVKKTEVQTGALTNESIYARGSFDKLISRKHRFESSKYGGFGSPTVTYSVLVVAKCKVQDGKVKKIKTGKELIGITLLDKLVFEKNPLKFIEDKGYGNVQIDKCIKLPKYSLFEFENGTRRMLASRGDLQKANEMFLPAKLVTLLYHAHKIESSKELEHEAYILDHYNDLYQLLSYIERFASLYVDVEKNISKVKELFSNIESYSISEICSSVINLLTLTASGAPADFKFLGTTIPRKRYGSPQSILSSTLIHQSITGLYETRIDLSQLGGD

SEQ ID NO: 105 - protein, 1356 aa, Streptococcus dysgalactiae
MDKKYSIGLDIGTNSVGWAVITDDYKVPSKKFKVLGNTDRHSIKKNLIGALLFDSGETAEATRLKRTARRRYTRRKNRIRYLQEIFSSEMSKVDDSFFHRLEESFLVEEDKKHERHPIFGNIVDEVAYHEKYPTIYHLRKKLADSTDKADLRLIYLALAHMIKFRGHFLIEGDLNPDNSDVDKLFIQLVQTYNQLFEENINASRVDAKAILSARLSKSRRLENLIAQLPGEKRNGLFGNLIALSLGLTPNFKSNFDLAEDAKLQLSKDTYDDDLDNLLAQIGDQYADLFLAAKNLSDAILLSDILRVNSEITKAPLSASMIKRYDEHHQDLTLLKALVRQQLPEKYKEIFFDQSKNGYAGYIDGGASQEEFYKFIKPILEKMDGTEELLAKLNREDLLRKQRTFDNGSIPHQIHLGELHAILRRQEDFYPFLKDNREKIEKILTFRIPYYVGPLARGNSRFAWMTRKSEETITPWNFEEVVDKGASAQSFIERMTNFDKNLPNEKVLPKHSLLYEYFTVYNELTKVKYVTEGMRKPAFLSGEQKKAIVDLLFKTNRKVTVKQLKEDYFKKIECFDSVEISGVEDRFNASLGTYHDLLKIIKDKDFLDNEENEDILEDIVLTLTLFEDKEMIEERLKTYAHLFDDKVMKQLKRRHYTGWGRLSRKLINGIRDKQSGKTILDFLKDGFANRNFIQLIHDDSLTFKEAIQKAQVSGQGHSLHEQIANLAGSPAIKKGILQSVKVVDELVKVMGHKPENIVIEMARENQTTQKGQKNSRERMKRIEEGIKELGSQILKEHPVENTQLQNEKLYLYYLQNGRDMYVDQELDINRLSDYDVDHIVPQSFIKDDSIDNKVLTRSDKNRGKSDNVPSEEVVKKMKNYWRQLLNAKLITQRKFDNLTKAERGGLSELDKAGFIKRQLVETRQITKHVAQILDSRMNTKYDENDKLIREVKVITLKSKLVSDFRKDFQFYKVREINNYHHAHDAYLNAVVGTALIKKYPKLESEFVYGDYKVYDVSEQEIGKATAKRFFYSNIMNFFKTEITLANGEIRKRPLIETNEETGEIVWDKGRDFATVRKVLSMPQVNIVKKTEVQTGALTNESIYARGSFDKLISRKHRFESSKYGGFGSPTVTYSVLVVAKSKVQDGKVKKIKTGKELIGITLLDKLVFEKNPLKFIEDKGYGNVQIDKCIKLPKYSLFEFENGTRRMLASRGDLQKANEMFLPAKLVTLLYHAHKIESSKELEHEAYILDHYNDLYQLLSYIERFASLYVDVEKNISKVKELFSNIESYSISEICSSVINLLTLTASGAPADFKFLGTTIPRKRYGSPQSILSSTLIHQSITGLYETRIDLSQLGGD

SEQ ID NO: 106 - protein, 1345 aa, Streptococcus equi
MKKPYTIALDIGTNSVGWVVVTDDYRVPTKKMKVLGNTERKTIKKNLIGALLFDSGDTAEGTRLKRTARRRYTRRKNRLRYLKEIFTEEMAKVDDGFFQRLEDSFYVLEDKEGNKHPIFANLADEVAYHKKYPTIYHLRKELVDNPQKADLRLIYLAVAHIIKFRGHFLIEGTLSSKNNNLQKSFDHLVDTYNLLFEEQLLTEGINAKELLSAALSKSKRLENLISLIPGQKKTGIFGNIIALSLGLTPNFKANFGLSKDVKLQLAKDTYADDLDSLLAQIGDQYADLFLAAKNLSDAILLSDILTESDEITRAPLSASMVKRYREHHKDLVTLKTLIKDQLPEKYQEIFLDKTKNGYAGYIEGQVSQEEFYKYLKPILARLDGSEPLLLKIDREDFLRKQRTFDNGSIPHQIHLEELHAILRRQEVFYPFLKDNRKKIESLLTFRIPYYVGPLARGHSRFAWVKRKFDGAIRPWNFEEIVDEEASAQIFIEKMTKNDLYLPNEKVLPKHSLLYETFTVYNELTKVKYATEGMTRPQFLSADQKQAIVDLLFKTNRKVTVKQLKENYFKKIECWDSVEITGVEDSFNASLGTYHDLLKIIQDKDFLDNPDNQKIIEDIILTLTLFEDKKMISKRLDQYAHLFDKVVLNKLERHHYTGWGRLSGKLINGIRDKQSGKTILDFLKDGFANRNFMQLIHDSELSFIDEIAKAQVIGKTEYSKDLVGNLAGSPAIKKGISQTIKIVDELVKIMGYLPQQIVIEMARENQTTAQGIKNARQRMRKLEETAKKLGSNILKEHPVDNSQLQNDKRYLYYLQNGKDMYTGDDLDIDYLSSYDIDHIIPQSFIKNNSIDNKVLTSQGANRGKLDNVPSEAIVRKMKGYWQSLLRAGAISKQKFDNLTKAERGGLTQVDKAGFIQRQLVETRQITKHVAQILDSRFNTEFDDHNKRIRKVHIITLKSKLVSDFRKEFGLYKIRDINHYHHAHDAYLNAVVAKAILGKYPQLAPEFVYGDYPKYNSFKERQKATQKMLFYSNILKFFKDQESLHVNSDGEEIWNANKHLPIIKNVLSIPQVNIVKKTEVQTGGFYKESILSKGNSDKLIPRKNNWDTRKYGGFDSPTVAYSVLVIAKMEKGKAKVLKPVKEMVGITIMERTAFEENPVVFLEARGYREIQEHLIIKLPKYSLFELENGRRRLLASSELQKGNELFLPVDYMTFLYLAAHYHELTGSSEDVLRKKYFVDRHLHYFDDIIQMINDFAERHILASSNLEKINHTYHNNSDLPVNERAENIINVFTFVALGAPAAFKFFDATIDRKRYTSTKEVLNATLIHQSVTGLYETRIDLSQLGEN

SEQ ID NO: 107 - protein, 1345 aa, Streptococcus equi
MKKPYTIALDIGTNSVGWVVVTDDYRVPTKKMKVLGNTERKTIKKNLIGALLFDSGDTAEGTRLKRTARRRYTRRKNRLRYLKEIFTEEMAKVDDGFFQRLEDSFYVLEDKEGNKHPIFANLADEVAYHKKYPTIYHLRKELVDNPQKADLRLIYLAVAHIIKFRGHFLIEGTLSSKNNNLQKSFDHLVDTYNLLFEEQLLTEGINAKELLSAALSKSKRLENLISLIPGQKKTGIFGNIIALSLGLTPNFKANFGLSKDVKLQLAKDTYADDLDSLLAQIGDQYADLFLAAKNLSDAILLSDILTESDEITRAPLSASMVKRYREHHKDLVTLKTLIKDQLPEKYQEIFLDKTKNGYAGYIEGQVSQEEFYKYLKPILARLDGSEPLLLKIDREDFLRKQRTFDNGSIPHQIHLEELHAILRRQEVFYPFLKDNRKKIESLLTFRIPYYVGPLARGHSRFAWVKRKFDGAIRPWNFEEIVDEEASAQIFIEKMTKNDLYLPNEKVLPKHSLLYETFTVYNELTKVKYATEGMTRPQFLSADQKQAIVDLLFKTNRKVTVKQLKENYFKKIECWDSVEITGVEDSFNASLGTYHDLLKIIQDKDFLDNPDNQKIIEDIILTLTLFEDKKMISKRLDQYAHLFDKVVLNKLERHHYTGWGRLSGKLINGIRDKQSGKTILDFLKDGFANRNFMQLIHDSELSFIDEIAKAQVIGKTEYSKDLVGNLASSPAIKKGISQTIKIVDELVKIMGYLPQQIVIEMARENQTTAQGIKNARQRMRKLEETAKKLGSNILKEHPVDNSQLQNDKRYLYYLQNGKDMYTGDDLDIDYLSSYDIDHIIPQSFIKNNSIDNKVLTSQGANRGKLDNVPSEAIVRKMKGYWQSLLRAGAISKQKFDNLTKAERGGLTQVDKAGFIQRQLVETRQITKHVAQILDSRFNTEFDDHNKRIRKVHIITLKSKLVSDFRKEFGLYKIRDINHYHHAHDAYLNAVVAKAILGKYPQLAPEFVYGDYPKYNSFKERQKATQKTLFYSNILKFFKDQESLHVNSDGEEIWNANKHLPIIKNVLSIPQVNIVKKTEVQTGGFYKESILSKGNSDKLIPRKNNWDTRKYGGFDSPTVAYSVLVIAKMEKGKAKVLKPVKEMVGITIMERIAFEENPVVFLEAKGYREIQEHLIIKLPKYSLFELENGRRRLLASSELQKGNELFLPVDYMTFLYLAAHYHELTGSSEDVLRKKYFVERHLHYFDDIIQMINDFAERHILASSNLEKINHTYHNNSDLPINERAENIINVFTFVALGAPAAFKFFDATIDRKRYTSTKEVLNATLIHQSVTGLYETRIDLSQLGEN

SEQ ID NO: 108 - protein, 1345 aa, Streptococcus equi
MKKPYTIALDIGTNSVGWVVVTDDYRVPTKKMKVLGNTERKTIKKNLIGALLFDSGDTAEGTRLKRTARPRYTRRKNRLRFLKEIFTEEMAKVDDGFFQRLEDSFYVLEDKEGNKHPIFANLADEVAYHKKYPTIYHLRKELVDNPQKADLRLIYLAVAHIIKFRGHFLIEGTLSSKNNNLQKSFDHLVDTYNLLFEEQLLTEGINAKELLSAALSKSKRLENLISLIPGQKKTGIFGNIIALSLGLTPNFKANFGLSKDVKLQLAKDTYADDLDSLLAQIGDQYADLFLAAKNLSDAILLSDILTESDEITRAPLSASMVKRYREHHKDLVTLKTLIKDQLPEKYQEIFLDKTKNGYAGYIEGQVSQEEFYKYLKPILARLDGSEPLLLKIDREDFLRKQRTFDNGSIPHQIHLEELHAILRRQEVFYPFLKDNRKKIESLLTFRIPYYVGPLARGHSRFAWVKRKFDGAIRPWNFEEIVDEEASAQIFIEKMTKNDLYLPNEKVLPKHSLLYETFTVYNELTKVKYATEGMTRPQFLSADQKQAIVDLLFKTNRKVTVKQLKENYFKKIECWDSVEITGVEDSFNASLGTYHDLLKIIQDKDFLDNPDNQKIIEDIILTLTLFEDKKMISKRLDQYAHLFDKVVLNKLERHHYTGWGRLSGKLINGIRDKQSGKTILDFLKDGFANRNFMQLIHDSELSFIDEIAKAQVIGKTEYSKDLVGNLAGSPAIKKGISQTIKIVDELVKIMGYLPQQIVIEMARENQTTAQGIKNARQRMRKLEETAKKLGSNILKEHPVDNSQLQNDKRYLYYLQNGKDMYTGDDLDIDYLSSYDIDHIIPQSFIKNNSIDNKVLTSQGANRGKLDNVPSEAIVRKMKGYWQSLLRAGAISKQKFDNLTKAERGGLTQVDKAGFIQLQLVETRQITKHVAQILDSRFNTEFDDHNKRIRKVHIITLKSKLVSDFRKEFGLYKIRDINHYHHAHDAYLNAVVAKAILGKYPQLAPEFVYGDYPKYNSFKERQKATQKTLFYSNILKFFKDQESLHVNSDGEEIWNANKHLPIIKNVLSIPQVNIVKKTEVQTGGFYKESILSKGNSDKLIPRKNNWDTRKYGGFDSPTVAYSVLVIAKMEKGKAKVLKPVKEMVGITIMERIAFEENPVVFLEAKGYREIQEHLIIKLPKYSLFELENGRRRLLASSELQKGNELFLPVDYMTFLYLAAHYHELTGSSEDVLRKKYFVERHLHYFDDIIQMINDFAERHILASSNLEKINHTYHNNSDLPVNERAENIINVFTFVALGAPAAFKFFDATIDRKRYTSTKEVLNATLIHQSVTGLYETRIDLSQLGEN

SEQ ID NO: 109 - protein, 1360 aa, Streptococcus equinus
MEKTYSIGLDIGTNSVGWAVITDDYKVPAKKMKVLGNTDKKYIKKNLLGALLFDSGETAEATRLKRAARRRYTRRKNRLRYLQEIFAKEMAKVDESFFQRLEESFLTDDDKTFDSHPIFGNKAEEDTYHQEFPTIYHLRKHLADSPEKVDLRLVYLALAHMIKFRGHFLIEGQLNAENTDVQKIFADFVGVYDRTFDDSHLSEITVDAASILTEKISKSRRLENLIKQYPTEKKNTLFGNLVALALGLQPNFKTNFKLSEDAKLQFSKDTYDEDLEELLGKIGDDYADLFTAAKNLYDAILLSGILTVDDNSTKAPLSASMIKRYEEHHEDLEKLKTFIKVNNFDKYHEIFKDKSKNGYAGYIENGVKQDIFYKHLKSIISEKNGGQYFLDKIEREDFLRKQRTFDNGSIPYQIHLQEMRTILRRQGEYYPFLKENQAKIEKILTFRIPYYVGPLARKNSRFAWAKYHSDEPITPWNFDEVVDKEKSAEKFITRMTLNDLYLPEEKVLPKHSYVYETFAVYNELTKIKYVNEQGKSFFFDANMKQEIFDHVFKENRKVTKAKLLSYLNNEFEEFRINDLIGLDKDSKSFNASLGTYHDLKKILDKSFLDDKTNEQIIEDIVLTLTLFEDRDMIHERLQKYSDIFTSQQLKKLERRHYTGWGRLSYKLINGIRNKENNKTILDFLIDDGDANRNFMQLINDDSLSFKTTIQEAQVVGDVDDIEAVVHDLPGSPAIKKGILQSVKIVDELVKVMGHNPQNIVIEMARENQITGYGRNRSNQRLKRLQDSLKPSYVDSKVENSHLQNDRLFLYYIQNGKDMYTGEELDIDHLSDYDIDHIIPQAFIKDNSIDNRVLTSSAKNRGKSDDVPSIEIVRNRKSYWYKLYKSGLISKRKFDNLTKAERGGLTETDKAGFIKRQLVETRQITKHVAQILDARFNTKCDENDKVIRDVKVITLKSSLVSQFRKEFKFYKVREINDYHHAHDAYLNAVVGTALLKKYPKLAPEFVYGEYKKYDVSSDNHSELGKATAKYFFYSNLMNFFKTEVKYADGRVFERPDIETNADGEVVWNKQRDFNIVRKVLSYPQVNIVKKVEVQTGGFSKESILPKGDSDKLIPRKTKKLQWETQKYGGFDSPTVAYSVLVVADVEKGKTRKLKTVKELVGISIMERSSFEENPVSFLEKKGYHNVQEDKLIKLPKYSLFEFEGGRRRLLASATELQKGNEVVLPQYMVNLLYHSQHVNNSHKPEHLNYVKQHKDEFKDIFNLIISIARINILKPKVVDNLINEFTEYGQEDISSLSESFINLLKFISFGAPGAFKFLKLDVKQSNLRYKSTTEALSATLIHQSVTGLYETRIDLSKLGEE

SEQ ID NO: 110 - protein, 1353 aa, Streptococcus gallolyticus
MTKKNYSIGLDIGTNSVGWAVITDDYKVPAKKMKVLGNTDKKYIKKNLLGALLFDSGETAEATRLKRTARRRYTRRKNRLRYLQEIFAEEMTKVDESFFYRLDESFLTTDEKDFERHPIFGNKAEEDAYHQKFPTIYHLRNYLADSSEKADLRLVYLALAHMIKYRGHFLIEGKLNAENTDVQKLFTDFVGVYDRTFDDSHLSEITVDVASTLTEKISKSRRLENLIKYYPTEKKNTLFGNLIALALGLQPNFKMNFKLSEDAKLQFSKDTYEEDLEELLGKIGDDYADLFTSAKNLYDAILLSGILTVDDNSTKAPLSASMIKRYVEHHEDLEKLKEFIKANKSELYHDIFKDKNKNGYAGYIENGVKQDEFYKYLKNTLSKIDGSDYFLDKIEREDFLRKQRTFDNGSIPHQIHLQEMHAILRRQGDYYPFLKEKQDRIEKILTFRIPYYVGPLVRKDSRFAWAEYRSDEKITPWNFDKVIDKEKSAEKFITRMTLNDLYLPEEKVLPKHSHVYETYAVYNELTKIKYVNEQGKESFFDSNMKQEIFDHVFKENRKVTKEKLLNYLNKEFPEYRIKDLIGLDKENKSFNASLGTYHDLKKILDKAFLDDKVNEEVIEDIIKTLTLFEDKDMIHERLQKYSDIFTANQLKKLERRHYTGWGRLSYKLINGIRNKENNKTILDYLIDDGSANRNFMQLINDDTLPFKQIIQKSQVVGDVDDIEAVVHDLPGSPAIKKGILQSVKIVDELVKVMGDNPDNIVIEMARENQTTNRGRSQSQQRLKKLQSSLKPSYIEDKVENSHLQNDQLFLYYIQNGKDMYTGDELDIDHLSDYDIDHIIPQAFIKDDSIDNRVLTSSAKNRGKSDDVPSLDIVRARKAEWVRLYKSGLISKRKFDNLTKAERGGLTEADKAGFIKRQLVETRQITKHVAQILDARFNTEHDENDKVIRDVKVITLKSNLVSQFRKDFEFYKVREINDYHHAHDAYLNAVVGTALLKKYPKLASEFVYGEYKKYDISSDKATAKYFFYSNLMNFFKTKVKYADGTVFERPIIETNADGEIAWNKQIDFEKVRKVLSYPQVNIVKKVETQTGGFSKESILPKGDSDKLIPRKTKKVYWDTKKYGGFDSPTVAYSVFVVADVEKGKAKKLKTVKELVGISIMERSFFEENPVEFLENKGYHNIREDKLIKLPKYSLFEFEGGRRRLLASASELQKGNEMVLPGYLVELLYHAHRADNFNSTEYLNYVSEHKKEFEKVLSCVEDFANLYVDVEKNLSKIRAVADSMDNFSIEEISNSFINLLTLTALGAPADFNFLGEKIPRKRYTSTKECLTATLIHQSITGLYETRIDLSKLGEE

SEQ ID NO: 111 - protein, 1354 aa, Streptococcus gallolyticus
MTEKNYSIGLDIGTNSVGWAVITDDYKVPAKKMKVLGNTDKKYIKKNLLGALLFDNGETAEATRLKRTARRRYTRRKNRLRYLQEIFAEEMAKVDESFFYRLDESFLTTDDKDFERHPIFGNKADEIKYHQEFPTIYHLRKHLADSHEKADLRLIYLALAHMIKFRGHFLIEGELNAENTDVQKLFEAFVEVYDRTFDDSNLSEITVDASSILTEKFSKSRRLENLIKHYPTEKKNTLFGNLVALALGLQPNFKTSFKLSEDAKLQFSKDTYEEDLEELIGKIGDEYADLFTSAKNLYDAILLSGILTVADNTTKAPLSASMIKRYNEHQVDLKKLKEFIKNNASDKYDEIFNDKDKNGYAGYIENGVKQDEFYKYLKTTLSKIDGSDYFLDKIEREDFLRKQRTFDNGSIPHQIHLQEMHAILRRQGEHYAFLKENQAKIEKILTFRIPYYVGPLARKNSRFAWAEYHSDEKITPWNFDEIIDKEKSAEKFITRMTLNDLYLPEEKVLPKHSLVYETYTVYNELTKVKYVNEQGKSNFFDANMKQEIFEHVFKENRKVTKDKFLNYLNKEFPEYRIQDLIGLDKENKSFNASLGTYHDLKKILDKSFLDDKTNETIIEDIIQTLTLFEDRDMIRQRLQKYSDIFTPQQLKKLERRHYTGWGRLSYKLINGIRNKENGKSILDYLIDDGYANRNFMQLISDDTLPFKQIIKDAQIIGDIDDVTSVVRELPGSPAIKKGILQSVKIVDELVKVMGHNPDNIVIEMARENQTTNRGRNQSQQRLKKLQDSLKPSYIEGKVENNHLQDDRLFLYYIQNGKDMYTGDELDIDHLSDYDIDHIIPQAFIKDDSIDNRVLTSSAKNRGKSDDVPSLDIVHDRKADWIRLYKSGLISKRKFDNLTKAERGGLTENDKAGFIKRQLVETRQITKHVAQILDSRFNTERDENDKVIRNVKVITLKSNLVSQFRKDFKFYKVREINDYHHAHDAYLNAVVGTALLKKYPKLAPEFVYGEYKKYDISGDKATAKYFFYSNLMNFFKRVIRYSNGKVVVRPVIECSKDTGEIAWNKQTDFEKVRRVLSYPQVNIVKKVETQTGGFSKESILPKGNSDKLIPRKTKKFRWDTPKYGGFDSPNIAYSVFVIADVEKGKAKKLKTVKELVGISIMERSSFEENPVVFLEKKGYQNVQEDNLIKLPKYSLFEFEGGRRRLLASASELQKGNEVVLSRHLVELLYHAHRVNSFNNSEHLKYVSEHKKEFGEVLSCVENFAKSYVDVEKNLGKIRAVADKIDTFSIEDISISFVNLLTLTALGAPADFNFLGEKIPRKRYTSTKECLNATLIHQSITGLYETRIDLSKLGEE

SEQ ID NO: 112 - protein, 1355 aa, Streptococcus gallolyticus; identical to SEQ ID NO: 11

SEQ ID NO: 113 - protein, 1358 aa, Streptococcus infantarius
MEKSYSIGLDIGTNSVGWAVITDDYKVPAKKMKVLGNTDKKYIKKNLLGALLFDSGETAEVTRLKRTARRRYTRRKNRLRYLQEIFAKEMTKVDESFFQRLEESFLTDDDKTFDSHPIFGNKAEEDAYHQKFPTIYHLRKYLADSQEKADLRLVYLALAHMIKYRGHFLIEGELNAENTDVQKLFNVFVETYDKIVDESHLSEIEVDASSILTEKVSKSRRLENLIKQYPTEKKNTLFGNLIALALGLQPNFKTNFKLSEDAKLQFSKDTYEEDLEELLGKVGDDYADLFISAKNLYDAILLSGILTVDDNSTKAPLSASMIKRYVEHHEDLEKLKEFIKINKLKLYHDIFKDKTKNGYAGYIDNGVKQDEFYKYLKTILTKIDDSDYFLDKIERDDFLRKQRTFDNGSIPHQIHLQEMHSILRRQGDYYPFLKENQAKIEKILTFRIPYYVGPLARKDSRFAWANYHSDEPITPWNFDEVVDKEKSAEKFITRMTLNDLYLPEEKVLPKHSHVYETFTVYNELTKIKYVNEQGESFFFDANMKQEIFDHVFKENRKVTKAKLLSYLNNEFEEFRINDLIGLDKDSKSFNASLGTYHDLKKILDKSFLDDKTNGQIIEDIVLTLTLFEDRDMIHERLQKYSDFFTSQQLKKLERRHYTGWGRLSYKLINGIRNKENNKTILDFLIDDGHANRNFMQLINDESLSFKTIIQEAQVVGDVDDIEAVVHDLPGSPAIKKGILQSVKIVDELVKVMGDNPDNIVIEMARENQTTGYGRNKSNQRLKRLQDSLKPSYVDSKVENSHLQNDRLFLYYIQNGKDMYTGEELDIDRLSDYDIDHIIPQAFIKDNSIDNKVLTSSAKNRGKSDDVPSIEIVRNRRSYWYKLYKSGLISKRKFDNLTKAERGGLTEADKAGFIKRQLVETRQITKHVAQILDARFNTKRDENDKVIRDVKVITLKSNLVSQFRKEFKFYKVREINDYHHAHDAYLNAVVGTALLKKYPKLTPEFVYGEYKKYDVSSDDYSEMGKATAKYFFYSNLMNFFKTEVKYADGRVFERPDIETNADGEVVWNKQKDFDIVRKVLSYPQVNIVKKVEAQTGGFSKESILSKGDSDKLIPRKTKKVYWNTKKYGGFDSPTVAYSVLVVADIEKGKAKKLKTVKELVGISIMERSFFEENPVSFLEKKGYHNVQEDKLIKLPKYSLFEFEGGRRRLLASATELQKGNEVMLPAHLVELLYHAHRIDSFNSTEHLKYVSEHKKEFEKVLSCVENFSNLYVDVEKNLSKVRAAAESMTNFSLEEISASFINLLTLTALGAPADFNFLGEKIPRKRYTSTKECLSATLIHQSVTGLYETRIDLSKLGEE

SEQ ID NO: 114 - protein, 1358 aa, Streptococcus iniae
MRKPYSIGLDIGTNSVGWAVITDDYKVPSKKMRIQGTTDRTSIKKNLIGALLFDNGETAEATRLKRTTRRRYTRRKYRIKELQKIFSSEMNELDIAFFPRLSESFLVSDDKEFENHPIFGNLKDEITYHNDYPTIYHLRQTLADSDQKADLRLIYLALAHIIKFRGHFLIEGNLDSENTDVHVLFLNLVNIYNNLFEEDVETASIDAEKILTSKTSKSRRLENLIAEIPNQKRNMLFGNLVSLALGLTPNFKTNFELLEDAKLQISKDSYEEDLDNLLAQIGDQYADLFIAAKKLSDAILLSDIITVKGASTKAPLSASMVQRYEEHQQDLALLKNLVKKQIPEKYKEIFDNKEKNGYAGYIDGKTSQEEFYKYIKPILLKLDGTEKLISKLEREDFLRKQRTFDNGSIPHQIHLNELKAIIRRQEKFYPFLKENQKKIEKLFTFKIPYYVGPLANGQSSFAWLKRQSNESITPWNFEEVVDQEASARAFIERMTNFDTYLPEEKVLPKHSPLYEMFMVYNELTKVKYQTEGMKRPVFLSSEDKEEIVNLLFKKERKVTVKQLKEEYFSKMKCFHTVTILGVEDRFNASLGTYHDLLKIFKDKAFLDDEANQDILEEIVWTLTLFEDQAMIERRLVKYADVFEKSVLKKLKKRHYTGWGRLSQKLINGIKDKQTGKTILGFLKDGVANRNFMQLINDSSLDFAKIIKNEQEKTIKNESLEETIANLAGSPAIKKGILQSIKIVDEIVKIMGQNPDNIVIEMARENQSTMQGIKNSRQRLRKLEEVHKNTGSKILKEYNVSNTQLQSDRLYLYLLQDGKDMYTGKELDYDNLSQYDIDHIIPQSFIKDNSIDNTVLTTQASNRGKSDNVPNIETVNKMKSFWYKQLKSGAISQRKFDHLTKAERGALSDFDKAGFIKRQLVETRQITKHVAQILDSRFNSNLTEDSKSNRNVKIITLKSKMVSDFRKDFGFYKLREVNDYHHAQDAYLNAVVGTALLKKYPKLEAEFVYGDYKHYDLPDSSLGKATTRMFFYSNLMNFFKKEIKLADDTIFTRPQIEVNTETGEIVWDKVKDMQTIRKVMSYPQVNIVMKTEVQTGGFSKESIWPKGDSDKLIARKKSWDPKKYGGFDSPIIAYSVLVVAKIAKGKTQKLKTIKELVGIKIMEQDEFEKDPIAFLEKKGYQDIQTSSIIKLPKYSLFELENGRKRLLASELQKGNELALPNKYVKFLYLASHYTKFTGKEEDREKKRSYVESHLYYFDEIMQIIVEYSNRYILADSNLIKIQNLYKEKDNFSIEEQAINMLNLFTFTDLGAPSAFKFFNGDIDRKRYSSTNEIINSTLIYQSPTGLYETRIDLSKLGGK

SEQ ID NO: 115 - protein, 1263 aa, Streptococcus iniae
  misc_feature (1257)..(1257): Xaa can be any naturally occurring amino acid
MRKPYSIGLDIGTNSVGWAVITDDYKVPSKKMRIQGTTDRTSIKKNLIGALLFDNGETAEATRLKRTTRRRYTRRKYRIKELQKIFSSEMNELDIAFFPRLSESFLVSDDKEFENHPIFGNLKDEITYHNDYPTIYHLRQTLADSDQKADLRLIYLALAHIIKFRGHFLIEGNLDSENTDVHVLFLNLVNIYNNLFEEDVETASIDAEKILTSKTSKSRRLENLIAEIPNQKRNMLFGNLVSLALGLTPNFKTNFELLEDAKLQISKDSYEEDLDNLLAQIGDQYADLFIAAKKLSDAILLSDIITVKGASTKAPLSASMVQRYEEHQQDLALLKNLVKKQIPEKYKEIFDNKEKNGYAGYIDGKTSQEEFYKYIKPILLKLDGTEKLISKLEREDFLRKQRTFDNGSIPHQIHLNELKAIIRRQEKFYPFLKENQKKIEKLFTFKIPYYVGPLANGQSSFAWLKRQSNESITPWNFEEVVDQEASARAFIERMTNFDTYLPEEKVLPKHSPLYEMFMVYNELTKVKYQTEGMKRPVFLSSEDKEEIVNLLFKKERKVTVKQLKEEYFSKMKCFHTVTILGVEDRFNASLGTYHDLLKIFKDKAFLDDEANQDILEEIVWTLTLFEDQAMIERRLVKYADVFEKSVLKKLKKRHYTGWGRLSQKLINGIKDKQTGKTILGFLKDGVANRNFMQLINDSSLDFAKIIKNEQEKTIKNESLEETIANLAGSPAIKKGILQSIKIVDEIVKIMGQNPDNIVIEMARENQSTMQGIKNSRQRLRKLEEVHKNTGSKILKEYNVSNTQLQSDRLYLYLLQDGKDMYTGKELDYDNLSQYDIDHIIPQSFIKDNSIDNTVLTTQASNRGKSDNVPNIETVNKMKSFWYKQLKSGAISQRKFDHLTKAERGALSDFDKAGFIKRQLVETRQITKHVAQILDSRFNSNLTEDSKSNRNVKIITLKSKMVSDFRKDFGFYKLREVNDYHHAQDAYLNAVVGTALLKKYPKLEAEFVYGDYKHYDLPDSSLGKATTRMFFYSNLMNFFKKEIKLADDTIFTRPQIEVNTETGEIVWDKVKDMQTIRKVMSYPQVNIVMKTEVQTGGFSKESIWPKGDSDKLIARKKSWDPKKYGGFDSPIIAYSVLVVAKIAKGKTQKLKTIKELVGIKIMEQDEFEKDPIAFLEKKGYQDIQTSSIIKLPKYSLFELENGRKRLLASELQKGNELALPNKYVKFLYLASHYTKFTGKEEDREKKRSYVESHLYYFXEVKSSF

SEQ ID NO: 116 - protein, 1257 aa, Streptococcus iniae
  misc_feature (1255)..(1255): Xaa can be any naturally occurring amino acid
  misc_feature (1257)..(1257): Xaa can be any naturally occurring amino acid
MRKPYSIGLDIGTNSVGWAVITDDYKVPSKKMRIQGTTDRTSIKKNLIGALLFDNGETAEATRLKRTTRRRYTRRKYRIKELQKIFSSEMNELDIAFFPRLSESFLVSDDKEFENHPIFGNLKDEITYHNDYPTIYHLRQTLADSDQKADLRLIYLALAHIIKFRGHFLIEGNLDSENTDVHVLFLNLVNIYNNLFEEDVETASIDAEKILTSKTSKSRRLENLIAEIPNQKRNMLFGNLVSLALGLTPNFKTNFELLEDAKLQISKDSYEEDLDNLLAQIGDQYADLFIAAKKLSDAILLSDIITVKGASTKAPLSASMVQRYEEHQQDLALLKNLVKKQIPEKYKEIFDNKEKNGYAGYIDGKTSQEEFYKYIKPILLKLDGTEKLISKLEREDFLRKQRTFDNGSIPHQIHLNELKAIIRRQEKFYPFLKENQKKIEKLFTFKIPYYVGPLANGQSSFAWLKRQSNESITPWNFEEVVDQEASARAFIERMTNFDTYLPEEKVLPKHSPLYEMFMVYNELTKVKYQTEGMKRPVFLSSEDKEEIVNLLFKKERKVTVKQLKEEYFSKMKCFHTVTILGVEDRFNASLGTYHDLLKIFKDKAFLDDEANQDILEEIVWTLTLFEDQAMIERRLVKYADVFEKSVLKKLKKRHYTGWGRLSQKLINGIKDKQTGKTILGFLKDGVANRNFMQLINDSSLDFAKIIKNEQEKTIKNESLEETIANLAGSPAIKKGILQSIKIVDEIVKIMGQNPDNIVIEMARENQSTMQGIKNSRQRLRKLEEVHKNTGSKILKEYNVSNTQLQSDRLYLYLLQDGKDMYTGKELDYDNLSQYDIDHIIPQSFIKDNSIDNTVLTTQASNRGKSDNVPNIETVNKMKSFWYKQLKSGAISQRKFDHLTKAERGALSDFDKAGFIKRQLVETRQITKHVAQILDSRFNSNLTEDSKSNRNVKIITLKSKMVSDFRKDFGFYKLREVNDYHHAQDAYLNAVVGTALLKKYPKLEAEFVYGDYKHYDLPDSSLGKATTRMFFYSNLMNFFKKEIKLADDTIFTRPQIEVNTETGEIVWDKVKDMQTIRKVMSYPQVNIVMKTEVQTGGFSKESIWPKGDSDKLIARKKSWDPKKYGGFDSPIIAYSVLVVAKIAKGKTQKLKTIKELVGIKIMEQDEFEKDPIAFLEKKGYQDIQTSSIIKLPKYSLFELENGRKRLLASELQKGNELALPNKYVKFLYLASHYTKFTGKEEDREKKRSYVESHLYXFX

SEQ ID NO: 117 - protein, 199 aa, Streptococcus iniae IUSA1
MEQDEFEKDPIAFLEKKGYQDIQTSSIIKLPKYSLFELENGRKRLLASKELQKGNELALPNKYVKFLYLASHYTKFTGKEEDREKKRSYVESHLYYFDEIMQIIVEYSNRYILADSNLIKIQNLYKEKDNFSIEEQAINMLNLFTFTDLGAPSAFKFFNGDIDRKRYSSTNEIINSTLIYQSPTGLYETRIDLSKLGGK

SEQ ID NO: 118 - protein, 1271 aa, Streptococcus iniae SF1
MRKPYSIGLDIGTNSVGWAVITDDYKVPSKKMRIQGTTDRTSIKKNLIGALLFDNGETAEATRLKRTTRRRYTRRKYRIKELQKIFSSEMNELDIAFFPRLSESFLVSDDKEFENHPIFGNLKDEITYHNDYPTIYHLRQTLADSDQKADLRLIYLALAHIIKFRGHFLIEGNLDSENTDVHVLFLNLVNIYNNLFEEDVETASIDAEKILTSKTSKSRRLENLIAEIPNQKRNMLFGNLVSLALGLTPNFKTNFELLEDAKLQISKDSYEEDLDNLLAQIGDQYADLFIAAKKLSDAILLSDIITVKGASTKAPLSASMVQRYEEHQQDLALLKNLVKKQIPEKYKEIFDNKEKNGYAGYIDGKTSQEEFYKYIKPILLKLDGTEKLISKLEREDFLRKQRTFDNGSIPHQIHLNELKAIIRRQEKFYPFLKENQKKIEKLFTFKIPYYVGPLANGQSSFAWLKRQSNESITPWNFEEVVDQEASARAFIERMTNFDTYLPEEKVLPKHSPLYEMFMVYNELTKVKYQTEGMKRPVFLSSEDKEEIVNLLFKKERKVTVKQLKEEYFSKMKCFHTVTILGVEDRFNASLGTYHDLLKIFKDKAFLDDEANQDILEEIVWTLTLFEDQAMIERRLVKYADVFEKSVLKKLKKRHYTGWGRLSQKLINGIKDKQTGKTILGFLKDGVANRNFMQLINDSSLDFAKIIKNEQEKTIKNESLEETIANLAGSPAIKKGILQSIKIVDEIVKIMGQNPDNIVIEMARENQSTMQGIKNSRQRLRKLEEVHKNTGSKILKEYNVSNTQLQSDRLYLYLLQDGKDMYTGKELDYDNLSQYDIDHIIPQSFIKDNSIDNTVLTTQASNRGKSDNVPNIETVNKMKSFWYKQLKSGAISQRKFDHLTKAERGALSDFDKAGFIKRQLVETRQITKHVAQILDSRFNSNLTEDSKSNRNVKIITLKSKMVSDFRKDFGFYKLREVNDYHHAQDAYLNAVVGTALLKKYPKLEAEFVYGDYKHYDLPDSSLGKATTRMFFYSNLMNFFKKEIKLADDTIFTRPQIEVNTETGEIVWDKVKDMQTIRKVMSYPQVNIVMKTEVQTGGFSKESIWPKGDSDKLIARKKSWDPKKYGGFDSPIIAYSVLVVAKIAKGKTQKLKTIKELVGIKIMEQDEFEKDPIAFLEKKGYQDIQTSSIIKLPKYSLFELENGRKRLLASELQKGNELALPNKYVKFLYLASHYTKFTGKEEDREKKRSYVESHLYYFDVRLSQVFRVTNVEF

SEQ ID NO: 119 - protein, 1345 aa, Streptococcus intermedius
MKKPYSIGLDIGTNSVGWAVVTDDYKVPAKKMKVLGNTDKSHIKKNLLGALLFDSGNTAEDRRLKRTARRRYTRRRNRILYLQEIFSEEMGKVDDSFFHRLEDSFLVTEDKRGERHPIFGNLEEEVKYHENFPTIYHLRQYLADNPEKTDLRLVYLALAHIIKFRGHFLIEGKFDTRNNDVQRLFQEFLAVYDNTFENSSLQEQNVQVEEILTDKISKSAKKDRVLKLFPNEKSNGRFAEFLKLIVGNQADFKKHFELEEKAPLQFSKDTYEEELEVLLAQIEDNYAELFLSAKKLYDSILLSGILTVTDVSTKAPLSASMIQRYNEHQMDLAQLKQFIRQKLSDKYNEVFSDVSKDGYAGYIDGKTNQEAFYKYLKGLLNKIEGSGYFLDKIEREDFLRKQRTFDNGSIPHQIHLQEMRAIIRRQAEFYPFLADNQDRIEKILTFRIPYYIGPLARGKSDFSWLSRKSADKITPWNFDEIVDKESSAEAFINRMTNYDLYLPNQKVLPRHSLLYEKFTVYNELTKVKYKTEQGKTAFFDANMKQEIFDGVFKVYRKVTKDKLMDFLEKEFDEFRIVDLTGLDKENKAFNASYGTYHDLRKILDKDFLDNSKNEKILEDIVLTLTLFEDREMIRKRLENYSDLLTKEQVKNLERRHYTGWGRLSAELIHGIRNKESRKTILDYLIDDGNSNRNFMQLINDDALSFKEEIAKAQVIGETDNLNQVVSDIAGSPAIKKGILQSLKIVDELVKIMGHQPENIVVEMARENQFTNQGRRNSQQRLKGLTDSIKEFGSQILKEHPVENSQLQNDRLFLYYLQNGRDMYTGEELDIDYLSQYDIDHIIPQAFIKDNSIDNRVLTSSKENRGKSDDVPSKDVVRKMKSYWSKLLSAKLITQRKFDNLTKAERGGLTDDDKAGFIKRQLVETRQITKHVARILDERFNTETDENNKKIRQVKIVTLKSNLVSNFRKEFELYKVREINDYHHAHDAYLNAVIGKALLGVYPQLEPEFVYGDYPHFHGHKENKATAKKFFYSNIMNFFKKDDVRTDKNGEIIWKKDEHISNIKKVLSYPQVNIVKKVEEQTGGFSKESILPKGNSDKLIPRKTKKFYWDTKKYGGFDSPIVAYSILVIANIEKGKSKKLKLVKDLVGITIMERTIFEKNPVAFLERKGYRNVQEENIVKLPKYSLFELENGRRRLLASARELQKGNEIVLPNHLGTMLYHAKNIHKVDEPKHLDYVKKHKDEFKELLDVVSNFSKKNILAESNLEKIEELYAQNNNKDITELASSFINLLTFTAIGAPAAFKFFDNNIDRKRYTSTTEILNATLIHQSITGLYETRIDLSRLGGD

SEQ ID NO: 120 - protein, 1333 aa, Streptococcus massiliensis
MKKPYSIGLDIGTNSVGWAVVMEDYKVPSKKMKVLGNTDKQSIKKNLIGALLFDSGETAVERRLNRTTSRRYDRRRNRIRYLQHIFAEEMNRADENFFHRLKESFFVEEDKTYSKYPIFGTLEEEKNYHKNYPTIYHLRKTLADTPDKMDIRLIYLALAHIIKYRGHFLIEGDLDIENIGIQDSFKSFIEEYNTQFGTKLDSTTKVEAIFTENSSKAKRVETILGLFPDETAAGNLDKFLKLMLGNQADFKKVFDLEEKITLQFSKDSYEEDLELLLSKIDEEYAALFDLAKKVYDAVLLSNILTVKEKNTKAPLSASMIKRYEEHKDDLKAFKRFFRERLPEKYETMFKDLTKPSYAAYVSGAVTEDDFYKFSKGLLIDVEGAEYFLEKIEREDFLRKQRTFDNGAIPNQVHVKELQAIILNQSKYYPFLAENKEKIEKILTFRIPYYVGPLARGNSSFAWLQRKSDEAIRPWNFEQVVDMETSASRFIERMTLHDLYLPDEKVLPRHSLIYEKYTVFNELTKVRFTPEGGKEVYFSKTDKENIFDSLFKRYRKVTKRKLKDFIEKELGYGYIDIDNIKGVEEQFNASYTTYQDLLKIIGDKEFLDNEENKDLLEEIIYILTVFEDRKMIEKRLSELNIPFENKIIKKLARKKYTGWGNLSRKLIDGIRNRETNRTILGHLIDDGFSNRNLMQLINDDGLDFKEIIRKAQTIENIDTNQALVSSLPGSPAIKKGILQSLNIVDEIIAIMGYAPTNIVIEMARENQTTQKGRDNSAQRLKKIEDGIKLGSDLLKQNPIQDNKDLQKEKLFLYYMQNGIDLYTGQPLNCDPDSLAFYDVDHIVPRSYIKNDSFDNKVLTTSKGNRKKLDDVPAKEVVEKMENTWRRLHAAGLISDIKLSYLMKGELTEEDKAGFIRRQLVETRQITKHVARLLDEKLNRKKNENGEKLRTTKIITLKSVFASRFRANFDLYKLRELNHYHHAHDAYLNAVVAQALLKVYPKFERELVYGSYVKESIFSRKATERMRMYNNILKFISKDKKDQETGEIVWDKKEIENIVKKVIYSSPVNIVKKREEQSGALFKQSNMAVGYNNKLIPRKKDWSVDKYGGFIEPAESYSLAIFYTDINGKKPKKKSTIIAISRMEKKDYEKEPERFLAQKGFERVEKTIKLPKYSLFEMEKGRRRLLASSGELQKGNQVLLPEHLIRLLSYAKKVDVLVKSKDDDYDLEEHRAEFAELLDCIKKFNDMYILASSNMSKIEEIYQKNIDAPIEEVARSFVLLNFTMMGAATDFKFFGQIIPRKRYPSTTECLKSTLIHQSVTGLYETRIDLSKLGEN

SEQ ID NO: 121 - protein, 1361 aa, Streptococcus mitis
NNKPYSIGLDIGTNSVGWAVITDDYKVPSKKMKVLGNTDKHFIKKNLLGALLFDEGTTAEDRRLKRTARRRYTRRKNRLRYLQEIFTEEMSKVDISFFHRLDDSFLVPEDKRGSKYPIFATLEEEKEYHKNFPTIYHLRKHLADSKEKADFRLIYLALAHIIKYRGHFLYEESFDIKNNDIQKIFNEFISIYDNTFEGSSLNGQNAQVEAIFTDKISKSAKRERVLKLFPDEKSTGLFSEFLKLIVGNQADFKKHFDLEEKAPLQFSKDTYDEDLENLLVQIGDDFADLFLVAKKLYDAILLSGILTVTDPSTKAPLSASMIDRYENHQKDLAALKQFIKTNLPEKYDEVFSDQSKDGYAGYIDGKTTQEAFYKYIKNLLSKLEGADYFLDKIEREDFLRKQRTFDNGSIPHQIHLQEMNAIIRRQGEHYPFLQENKEKIEKILTFRIPYYVGPLARGNRDFAWLTRNSDQAIRPWNFEEIVDKARSAEDFINKMTNYDLYLPEEKVLPKHSLLYETFAVYNELTKVKFIAEGLRDYQFLDSGQKQQIVTQLFKEKRKVTEKDIIQYLHNVDSYDGIELKGIEKQFNASLSTYHDLLKIIKDKEFMDDSKNEAILENIVHTLTIFEDREMIKQRLAHYASIFDEKVIKALTRRHYTGWGKLSAKLINGIYDKQSKKTILDYLIDDGEINRNFMQLINDDGLSFKEIIQKAQVVGKTNDVKQVVQELPGSPAIKKGILQSIKLVDELVKVMGHAPESIVIEMARENQTTARGKKNSQQRYKRIEDALKNLAHNILKEHPTDNIQLQNDRLFLYYLQNGKDMYTGKSLDINQLSSCDIDHIIPQAFIKDDSLDNRVLTSSKDNRGKSDNVPSLEIVQKRKAFWQQLLDSKLISERKFNNLTKAERGGLDERDKVGFIKRQLVETRQITKHVAQILDARFNTEVTEKDKKDRSVKIITLKSNLVSNFRKEFRLYKVREINDYHHAHDPYLNAVVAKAILKKYPKLEPEFVYGDYQKYDLTKDPKEVEKATEKYFFYSNLLNFFKEEVHYADGTIVKRENIEYSKDTGEIAWNKEKDFATIKKVLSLPQVNIVKKTEEQTGGLFDNNIVSKKKVVDASKLTPIKSGLSPEKYGGYARPTIAYSVLVIADIEKGKAKKLKRIKEMVGITVQDKKKFEANPIAYLEECGYKNINPNLIIKLPKYSLFEFNNGQRRLLASSIELQKGNELIVPYHFTALLYHAQRINKISEPIHKQYVETHQSEFKELLTAIISLSKKYIQKPNVESLLQQAFDQSDKDIYQLSESFISLLKLISFGAPGTFKFLGVEISQSNVRYQSVSSCFNATLIHQSITGLYETRIDLSKLGED

SEQ ID NO: 122 - protein, 1359 aa, Streptococcus mitis; identical to SEQ ID NO: 12

SEQ ID NO: 123 - protein, 1345 aa, Streptococcus mutans
MKKPYSIGLDIGTNSVGWAVVTDDYKVPAKKMKVLGNTDKSHIEKNLLGALLFDSGNTAEDRRLKRTARRRYTRRRNRILYLQEIFSEEMGKVDDSFFHRLEDSFLVTEDKRGERHPIFGNLEEEVKYHENFPTIYHLRQYLADNPEKVDLRLVYLALAHIIKFRGHFLIEGKFDTRNNDVQRLFQEFLAVYDNTFENSSLQEQNVQVEEILTDKISKSAKKDRVLKLFPNEKSNGRFAEFLKLIVGNQADFKKHFELEEKAPLQFSKDTYEEELEVLLAQIGDNYAELFLSAKKLYDSILLSGILTVTDVGTKAPLSASMIQRYNEHQMDLAQLKQFIRQKLSDKYNEVFSDVSKDGYAGYIDGKTNQEAFYKYLKGLLNKIEGSGYFLDKIEREDFLRKQRTFDNGSIPHQIHLQEMRAIIRRQAEFYPFLADNQDRIEKLLTFRIPYYVGPLARGKSDFAWLSRKSADKITPWNFDEIVDKESSAEAFINRMTNYDLYLPNQKVLPKHSLLYEKFTVYNELTKVKYKTEQGKTAFFDANMKQEIFDGVFKVYRKVTKDKLMDFLEKEFDEFRIVDLTGLDKENKVFNASYGTYHDLCKILDKDFLDNSKNEKILEDIVLTLTLFEDREMIRKRLENYSDLLTKEQVKKLERRHYTGWGRLSAELIHGIRNKESRKTILDYLIDDGNSNRNFMQLINDDALSFKEEIAKAQVIGETDNLNQVVSDIAGSPAIKKGILQSLKIVDELVKIMGHQPENIVVEMARENQFTNQGRRNSQQRLKGLTDSIKEFGSQILKEHPVENSQLQNDRLFLYYLQNGRDMYTGEELDIDYLSQYDIDHIIPQAFIKDNSIDNRVLTSSKENRGKSDDVPSKDVVRKMKSYWSKLLSAKLITQRKFDNLTKAERGGLTDDDKAGFIKRQLVETRQITKHVARILDERFNTETDENNKKIRQVKIVTLKSNLVSNFRKEFELYKVREINDYHHAHDAYLNAVIGKALLGVYPQLEPEFVYGDYPHFHGHKENKATAKKFFYSNIMNFFKKDDVRTDKNGEIIWKKDEHISNIKKVLSYPQVNIVKKVEEQTGGFSKESILPKGNSDKLIPRKTKKFYWDTKKYGGFDSPIVAYSILVIADIEKGKSKKLKTVKALVGVTIMEKMTFERDPVAFLERKGYRNVQEENIIKLPKYSLFKLENGRKRLLASARELQKGNEIVLPNHLGTLLYHAKNIHKVDEPKHLDYVDKHKDEFKELLDVVSNFSKKYTLAEGNLEKIKELYAQNNGEDLKELASSFINLLTFTAIGAPATFKFFDKNIDRKRYTSTTEILNATLIHQSITGLYETRIDLNKLGGD

SEQ ID NO: 124 - protein, 1345 aa, Streptococcus mutans
MKKPYSIGLDIGTNSVGWAVVTDDYKVPAKKMKVLGNTDKSHIEKNLLGALLFDSGNTAEDRRLKRTARRRYTRRRNRILYLQEIFSEEMGKVDDSFFHRLEDSFLVTEDKRGERHPIFGNLEEEVKYHENFPTIYHLRQYLADNPEKVDLRLVYLALAHIIKFRGHFLIEGKFDTRNNDVQRLFQEFLAVYDNTFENSSLQEQNVQVEEILTDKISKSAKKDRVLKLFPNEKSNGRFAEFLKLIVGNQADFKKHFELEEKAPLQFSKDTYEEELEVLLAQIGDNYAELFLSAKKLYDSILLSGILTVTDVGTKAPLSASMIQRYNEHQMDLAQLKQFIRQKLSDKYNEVFSDVSKDGYAGYIDGKTNQEAFYKYLKGLLNKIEGSGYFLDKIEREDFLRKQRTFDNGSIPHQIHLQEMRAIIRRQAEFYPFLADNQDRIEKLLTFRIPYYVGPLARGKSDFAWLSRKSADKITPWNFDEIVDKESSAEAFINRMTNYDLYLPNQKVLPKHSLLYEKFTVYNELIKVKYKTEQGKTAFFDANMKQEIFDGVFKVYRKVTKDKLMDFLEKEFDEFRIVDLTGLDKENKVFNASYGTYHDLCKILDKDFLDNSKNEKILEDIVLTLTLFEDREMIRKRLENYSDLLTKEQVKKLERRHYTGWGRLSAELIHGIRNKESRKTILDYLIDDGNSNRNFMQLINDDALSFKEEIAKAQVIGETDNLNQVVSDIAGSPAIKKGILQSLKIVDELVKIMGHQPENIVVEMARENQFTNQGRRNSQQRLKGLTDSIKEFGSQILKEHPVENSQLQNDRLFLYYLQNGRDMYTGEELDIDYLSQYDIDHIIPQAFIKDNSIDNRVLTSSKENRGKSDDVPSKDVVRKMKSYWSKLLSAKLITQRKFDNLTKAERGGLTDDDKAGFIKRQLVETRQITKHVARILDERFNTETDENNKKIRQVKIVTLKSNLVSNFRKEFELYKVREINDYHHAHDAYLNAVIGKALLGVYPQLEPEFVYGDYPHFHGHKENKATAKKFFYSNIMNFFKKDDVRTDKNGEIIWKKDEHISNIKKVLSYPQVNIVKKVEEQTGGFSKESILPKGNSDKLIPRKTKKFYWDTKKYGGFDSPIVAYSILVIADIEKGKSKKLKTVKALVGVTIMEKMTFERDPVAFLERKGYRNVQEENIIKLPKYSLFKLENGRKRLLASARELQKGNEIVLPNHLGTLLYHAKNIHKVDEPKHLDYVDKHKDEFKELLDVVSNFSKKYTLAEGNLEKIKELYAQNNGEDLKELASSFINLLTFTAIGAPATFKFFDKNIDRKRYTSTTEILNATLIHQSITGLYETRIDLNKLGGD

SEQ ID NO: 125 - protein, 1345 aa, Streptococcus mutans
MKKPYSIGLDIGTNSVGWAVVTDDYKVPAKKMKVLGNTDKSHIKKNLLGALLFDSGNTAEDRRLKRTARRRYTRRRNRILYLQEIFSEEMGKVDDSFFHRLDESFLTDDDKNFDSYPIFGNKAEEDAYHQKFPTIYHLRKHLADSTEKADLRLVYLALAHMIKFRGHFLIEGELNAENTDVQKLFADFVGVYDRTFDDSHLSEITVDASSILTEKISKSRRLEKLINNYPKEKKNTLFRNLVALSLGLQPNFKTNFKLSEDAKLQFSKDTYEEDLEELLGKIGDDYADLFTLAKNLYDAILLSGILTADDSSTKAPLSASMIKRYAEHHEDLEKLKEFIKANKPELYHDIFKDETKNGYAGYIENGVKQDEFYKYLKNTLSKIAGSDYFLDKIEREDFLRKQRTFDNGSIPHQIHLQEMHAILRRQGDYYPFLKENQDRIEKILTFRIPYYVGPLARGKSDFAWLSRKSADKITPWNFDEIVDKESSVEAFINRMTNYDLYLPNQKVLPKHSLLYEKFTVYNELTKVKYKTEQGKTAFFDANMKQEIFDGVFKVYRKVTKDKLMDFLEKEFDEFRIVDLTGLDKENKAFNASYGTYHDLRKILDKDFLDNSKNEKILEDIVLTLTLFEDREMIRKRLKNYSDLLTKEQLKKLERRHYTGWGRLSAELIHGIRNKESRKTILDYLIDDGNSNRNFMQLINDDALSFKEEIAKAQVIGETDNLNQVVSDIAGSPAIKKGILQSLKIVDELVKIMGHQPENIVVEMARENQFTNQGRRNSQQRLKGLTDSIKEFGSQILKEHPVENSQLQNDRLFLYYLQNGRDMYTGEELDIDYLSQYDIDHIIPQAFIKDNSIDNRVLTSSKENRGKSDDVPSKDVVRKMKSYWSKLLSAKLITQRKFDNLTKGERGGLTDDDKAGFIKRQLVETRQITKHVARILDERFNTETDENNKKIRQVKIVTLKSNLVSNFRKEFELYKVREINDYHHAHDAYLNAVIGKALLGVYPQLEPEFVYGDYPHFHGHKENKATAKKFFYSNIMNFFKKDDVRTDKNGEIIWKKDEYISNIKKVLSYPQVNIVKKVEEQTGGFSKESILPKGDSDKLIPRKTKKFYWDTKKYGGFDSPIVAYSILVIADIEKGKSKKLKTVKALVGVTIMEKMTFERDPVAFLERKGYRNVQEENIIKLPKYSLFKLENGRKRLLASARELQKGNEIVLPNHLGTLLYHAKNIHKVDEPKHLDYVDKHKDEFKELLDVVSNFSKKYTLAEGNLEKIKELYAQNNGEDLKELASSFINLLTFTAIGAPATFKFFDKNIDRKRYTSTTEILNATLIHQSITGLYETRIDLSKLGGD

SEQ ID NO: 126 - protein, 1345 aa, Streptococcus mutans
MKKPYSIGLDIGTNSVGWAVVTDDYKVPAKKMKVLGNTDKSHIKKNLLGALLFDSGNTAEDRRLKRTARRRYTRRRNRILYLQEIFSEEMGKVDDSFFHRLEDSFLVTEDKRGERHPIFGNLEEEVKYHENFPTIYHLRQYLADNPEKTDLRLVYLALAHIIKFRGHFLIEGKFDTRNNDVQRLFQEFLAVYDNTFENSSLQEQNVQVEEILTDKISKSAKKDRVLKLFPNEKSNGRFAEFLKLIVGNQADFKKHFELEEKAPLQFSKDIYEEELEVLLAQIGDNYAELFLSAKKLYDSILLSGILTVTDVSTKAPLSASMIQRYNEHQMDLAQLKQFIRQKLSDKYNEVFSDVSKDGYAGYIDGKTNQEAFYKYLKGLLNKIEGSGYFLDKIEREDFLRKQRTFDNGSIPHQIHLQEMRAIIRRQAEFYPFLADNQDRIEKILTFRIPYYVGPLARGKSDFAWLSRKSADKITPWNFDEIVDKESSVEAFINRMTNYDLYLPNQKVLPKHSLLYEKFTVYNELTKVKYKTEQGKTAFFDANMKQEIFDGVFKVYRKVTKDKLMDFLEKEFDEFRIVDLTGLDKENKAFNASYGTYHDLRKILDKDFLDNSKNEKILEDIVLTLTLFEDREMIRKRLKNYSDLLTKEQLKKLERRHYTGWGRLSAELIHGIRNKESRKTILDYLIDDGNSNRNFMQLINDDALSFKEEIAKAQVIGETDNLNQVVSDIAGSPAIKKGILQSLKIVDELVKIMGHQPENIVVEMARENQFTNQGRRNSQQRLKGLTDSIKEFGSQILKEHPVENSQLQNDRLFLYYLQNGRDMYTGEELDIDYLSQYDIDHIIPQAFIKDNSIDNRVLTSSKENRGKSDDVPSKDVVRKMKSYWSKLLSAKLITQRKFDNLTKAERGGLTDDDKAGFIKRQLVETRQITKHVARILDERFNTETDENNKKIRQVKIVTLKSNLVSNFRKEFELYKVREINDYHHAHDAYLNAVIGKALLGVYPQLEPEFVYGDYPHFHGHKENKATAKKFFYSNIMNFFKKDDVRTDKNGEIIWKKDEHISNIKKVLSYPQVNIVKKVEEQTGGFSKESILPKGNSDKLIPRKTKKFYWDTKKYGGFDSPIVAYSILVIADIEKGKSKKLKTVKALVGVTIMEKMTFERDPVAFLERKGYRNVQEENIIKLPKYSLFKLENGRKRLLASARELQKGNEIVLPNHLGTLLYHAKNIHKVDEPKHLDYVDKHKDEFKELLDVVSNFSKKYTLAEGNLEKIKELYAQNNGEDLKELASSFINLLTFTAIGAPATFKFFDKNIDRKRYTSTTEILNATLIHQSITGLYETRIDLNKLGGD

SEQ ID NO: 127 - protein, 1345 aa, Streptococcus mutans
MKKPYSIGLDIGTNSVGWAVVTDDYKVPAKKMKVLGNTDKSHIKKNLLGALLFDSGNTAEDRRLKRTARRRYTRRRNRILYLQEIFSEEMGKVDDSFFHRLEDSFLVTEDKRGERHPIFGNLEEEVKYHENFPTIYHLRQYLADNPEKVDLRLVYLALAHIIKFRGHFLIEGKFDTRNNDVQRLFQEFLAVYDNTFENSSLQEQNVQVEEILTDKISKSAKKDRVLKLFPNEKSNGRFAEFLKLIVGNQADFKKHFELEEKAPLQFSKDTYEEELEVLLAQIGDNYAELFLSAKKLYDSILLSGILTVTDVSTKAPLSASMIQRYNEHQMDLAQLKQFIRQKLSDKYNEVFSDVSKDGYAGYIDGKTNQEAFYKYLKGLLNKIEGSGYFLDKIEREDFLRKQRTFDNGSIPHQIHLQEMRAIIRRQAEFYPFLADNQDRIEKILTFRIPYYVGPLARGKSDFAWLSRKSADKITPWNFDEIVDKESSAEAFINRMTNYDLYLPNQKVLPKHSLLYEKFTVYNELTKVKYKTEQGKTAFFDANMKQEIFDGVFKVYRKVTKDKLMDFLEKEFDEFRIVDLTGLDKENKVFNASYGTYHDLCKILDKDFLDNSKNEKILEDIVLTLTLFEDREMIRKRLENYSDLLTKEQVKKLERRHYTGWGRLSAELIHGIRNKESRKTILDYLIDDGNSNRNFMQLINDDALSFKEEIAKAQVIGETDNLNQVVSDIAGSPAIKKGILQSLKIVDELVKIMGHQPENIVVEMARENQFTNQGRQNSQQRLKGLTDSIKEFGSQILKEHPVENSQLQNDRLFLYYLQNGRDMYTGEELDIDYLSQYDIDHIIPQAFIKDNSIDNRVLTSSKENRGKSDDVPSEDVVRKMKSYWSKLLSAKLITQRKFDNLTKAERGGLTDDDKAGFIKRQLVETRQITKHVARILDERFYTETDENNKKIRQVKIVTLKSNLVSNFRKEFELYKVREINDYHHAHDAYLNAVIGKALLGVYPQLEPEFVYGDYPHFHGHKENKATAKKFFYSNIMNFFKKDDVRTDKNGEIIWKKDEHISNIKKVLSYPQVNIVKKVEEQTGGFSKESILPKGNSDKLIPRKTKKFYWDTKKYGGFDSPIVAYSILVIADIEKGKSKKLKTVKALVGVTIMEKMTFERDPVAFLERKGYRNVQEENIIKLPKYSLFKLENGRKRLLASARELQKGNEIVLPNHLGTLLYHAKNIHKVDEPKHLDYVDKHKDEFKELLDVVSNFSKKYTLAEGNLEKIKELYAQNNGEDLKELASSFINLLTFTAIGAPATFKFFDKNIDRKRYTSTTEILNATLIHQSITGLYETRIDLSKLGGD

SEQ ID NO: 128 - protein, 1345 aa, Streptococcus mutans
MKKPYSIGLDIGTNSVGWAVVTDDYKVPAKKMKVLGNTDKSHIKKNLLGALLFDSGNTAEDRRLKRTARRRYTRRRNRILYLQEIFSEEMGKVDDSFFHRLEDSFLVTEDKRGERHPIFGNLEEEVKYHENFPTIYHLRQYLADNPEKVDLRLVYLALAHIIKFRGHFLIEGKFDTRNNDVQRLFQEFLAVYDNTFENSSLQEQNVQVEEILTDKISKSAKKDRVLKLFPNEKSNGRFAEFLKLIVGNQADFKKHFELEEKAPLQFSKDTYEEDLEELLGKIGDDYADLFTLAKNLYDAILLSGILTADDSSTKAPLSASMIQRYNEHQMDLAQLKQFIRQKLSDKYNEVFSDVSKDGYAGYIDGKTNQEAFYKYLKGLLNKIEGSGYFLDKIEREDFLRKQRTFDNGSIPHQIHLQEMRAIIRRQAEFYPFLADNQDRIEKILTFRIPYYVGPLARGKSDFAWLSRKSADKITPWNFDEIVDKESSAEAFINRMTNYDLYLPNQKVLPKHSLLYEKFTVYNELTKVKYKTEQGKTAFFDANMKQEIFDGVFKVYRKVTKDKLMDFLEKEFDEFRIVDLTGLDKENKVFNASYGTYHDLCKILDKDFLDNSKNEKILEDIVLTLTLFEDREMIRKRLENYSDLLTKEQVKKLERRHYTGWGRLSAELIHGIRNKESRKTILDYLIDDGNSNRNFMQLINDDALSFKEEIAKAQVIGETDNLNQVVSDIAGSPAIKKGILQSLKIVDELVKIMGHQPENIVVEMARENQFTNQGRRNSQQRLKGLTDSIKEFGSQILKEHPVENSQLQNDRLFLYYLQNGRDMYTGEELDIDYLSQYDIDHIIPQAFIKDNSIDNRVLTSSKENRGKSDDVPSKDVVRKMKSYWSKLLSAKLITQRKFDNLTKAERGGLTDDDKAGFIKRQLVETRQITKHVARILDERFYTETDENNKKIRQVKIVTLKSNLVSNFRKEFELYKVREINDYHHAHDAYLNAVIGKALLGVYPQLEPEFVYGDYPHFHGHKENKATAKKFFYSNIMNFFKKDDVRTDKNGEIIWKKDEHISNIKKVLSYPQVNIVKKVEEQTGGFSKESILPKGNSDKLIPRKTKKFYWDTKKYGGFDSPIVAYSILVIADIEKGKSKKLKTVKALVGVTIMEKMTFERDPVAFLERKGYRNVQEENIIKLPKYSLFKLENGRKRLLASARELQKGNEIVLPNHLGTLLYHAKNIHKVDEPKHLDYVDKHKDEFKELLDVVSNFSKKYTLAEGNLEKIKELYAQNNGEDLKELASSFINLLTFTAIGAPATFKFFDKNIDRKRYTSTTEILNATLIHQSITGLYETRIDLSKLGGD

SEQ ID NO: 129 - protein, 1345 aa, Streptococcus mutans
MKKPYSIGLDIGTNSVGWAVVTDDYKVPAKKMKVLGNTDKSHIKKNLLGALLFDSGNTAEDRRLKRTARRRYTRRRNRILYLQEIFSEEMGKVDDSFFHRLEDSFLVTEDKRGERHPIFGNLEEEVKYHENFPTIYHLRQYLADNPEKVDLRLVYLALAHIIKFRGHFLIEGKFDTRNNDVQRLFQEFLAVYDNTFENSSLQEQNVQVEEILTDKISKSAKKDRVLKLFPNEKSNGRFAEFLKLIVGNQADFKKHFELEEKAPLQFSKDTYEEDLEELLGKIGDDYADLFTLAKNLYDAILLSGILTADDSSTKAPLSASMIQRYNEHQMDLAQLKQFIRQKLSDKYNEVFSDVSKDGYAGYIDGKTNQEAFYKYLKGLLNKIEGSGYFLDKIEREDFLRKQRTFDNGSIPHQIHLQEMRAIIRRQAEFYPFLADNQDRIEKILTFRIPYYVGPLARGKSDFAWLSRKSADKITPWNFDEIVDKESSAEAFINRMTNYDLYLPNQKVLPKHSLLYEKFTVYNELTKVKYKTEQGKTAFFDANMKQEIFDGVFKVYRKVTKDKLMDFLEKEFDEFRIVDLTGLDKENKVFNASYGTYHDLCKILDKDFLDNSKNEKILEDIVLTLTLFEDREMIRKRLENYSDLLTKEQVKKLERRHYTGWGRLSAELIHGIRNKESRKTILDYLIDDGNSNRNFMQLINDDALSFKEEIAKAQVIGETDNLNQVVSDIAGSPAIKKGILQSLKIVDELVKIMGHQPENIVVEMARENQFTNQGRRNSQQRLKGLTDSIKEFGSQILKEHPVENSQLQNDRLFLYYLQNGRDMYTGEELDIDYLSQYDIDHIIPQAFIKDNSIDNRVLTSSKENRGKSDDVPSKDVVRKMKPYWSKLLSAKLITQRKFDNLTKAERGGLTDDDKAGFIKRQLVETRQITKHVARILDERFNTETDENNKKIRQVKIVTLKSNLVSNFRKEFELYKVREINDYHHAHDAYLNAVIGKALLGVYPQLEPEFVYGDYPHFHGHEENKATAKKFFYSNIMNFFKKDDVRTDKNGEIIWKKDEHISNIKKVLSYPQVNIVKKVEEQTGGFSKESILPKGNSDKLIPRKTKKFYWDTKKYGGFDSPIVAYSILVIADIEKGKSKKLKTVKALVGVTIMEKMTFERDPVAFLERKGYRNVQEENIIKLPKYSLFKLENGRKRLLASARELQKGNEIVLPNHLGTLLYHAKNIHKVDEPKHLDYVDKHKDEFKELLDVVSNFSKKYTLAEGNLEKIKELYAQNNGEDLKELASSFINLLTFTAIGAPATFKFFDKNIDRKRYTSTTEILNATLIHQSITGLYETRIDLSKLGGD

SEQ ID NO: 130 - protein, 1345 aa, Streptococcus mutans
MKKPYSIGLDIGTNSVGWAVVTDDYKVPAKKMKVLGNTDKSHIKKNLLGALLFDSGNTAEDRRLKRTARRRYTRRRNRILYLQEIFSEEMGKVDDSFFHRLEDSFLVTEDKRGERHPIFGNLEEEVKYHENFPTIYHLRQYLADNPEKVDLRLVYLALAHIIKFRGHFLIEGKFDTRNNDVQRLFQEFLAVYDNTFENSSLQEQNVQVEEILTDKISKSAKKDRVLKLFPNEKSNGRFAEFLKLIVGNQADFKKHFELEEKAPLQFSKDTYEEELEVLLAQIGDNYAELFLSAKKLYDSILLSGILTVTDVSTKAPLSASMIQRYNEHQMDLAQLKQFIRQKLSDKYNEVFSDVSKDGYAGYIDGKTNQEAFYKYLKGLLNKIEGSGYFLDKIEREDFLRKQRTFDNGSIPHQIHLQEMRAIIRRQAEFYPFLADNQDRIEKILTFRIPYYVGPLARGKSDFAWLSRKSADKITPWNFDEIVDKESSAEAFINRMTNYDLYLPNQKVLPKHSLLYEKFTVYNELTKVKYKTEQGKTAFFDANMKQEIFDGVFKVYRKVTKDKLMDFLEKEFDEFRIVDLTGLDKENKVFNASYGTYHDLCKILDKDFLDNSKNEKILEDIVLTLTLFEDREMIRKRLENYSDLLTKEQVKKLERRHYTGWGRLSAELIHGIRNKESRKTILDYLIDDGNSNRNFMQLINDDALSFKEEIAKAQVIGETDNLNQVVSDIAGSPAIKKGILQSLKIVDELVKIMGHQPENIVVEMARENQFTKQGRRNSQQRLKGLTDSIKEFGSQILKEHPVENSQLQNDRLFLYYLQNGRDMYTGEELDIDYLSQYDIDHIIPQAFIKDNSIDNRVLTSSKENRGKSDDVPSKDVVRKMKSYWSKLLSAKLITQRKFDNLTKAERGGLTDDDKAGFIKRQLVETRQITKHVARILDERFYTETDENNKKIRQVKIVTLKSNLVSNFRKEFELYKVREINDYHHAHDAYLNAVIGKALLGVYPQLEPEFVYGDYPHFHGHKENKATAKKFFYSNIMNFFKKDDVRTDKNGEIIWKKDEHISNIKKVLSYPQVNIVKKVEEQTGGFSKESILPKGNSDKLIPRKTKKFYWDTKKYGGFDSPIVAYSILVIADIEKGKSKKLKTVKALVGVTIMEKMTFERDPVAFLERKGYRNVQEENIIKLPKYSLFKLENGRKRLLASARELQKGNEIVLPNHLGTLLYHAKNIHKVDEPKHLDYVDKHKDEFKELLDVVSNFSKKYTLAEGNLEKIKELYAQNNGEDLKELASSFINLLTFTAIGAPATFKFFDKNIDRKRYTSTTEILNATLIHQSITGLYETRIDLSKLGGD

SEQ ID NO: 131 - protein, 1345 aa, Streptococcus mutans
MKKPYSIGLDIGTNSVGWAVVTDDYKVPAKKMKVLGNTDKSHIKKNLLGALLFDSGNTAADRRLKRTARRRYTRRRNRILYLQEIFAEEMSKVDDSFFHRLEDSFLVTEDKRGERHPIFGNLEEEVKYHENFPTIYHLRQYLADNPEKVDLRLVYLALAHIIKFRGHFLIEGKFDTRNNDVQRLFQEFLAVYDNTFENSSLQEQNVQVEEILTDKISKSAKKDRVLKLFPNEKSNGRFAEFLKLIVGNQADFKKHFELEEKAPLQFSKDTYEEELEVLLTQIGDNYAELFLSAKKLYDSILLSGILTVTDVSTKAPLSASMIQRYNEHQMDLAQLKQFIRQKLSDKYNEVFSDVSKDGYAGYIDGKTNQEAFYKYLKGLLNKIEGSGYFLDKIEREDFLRKQRTFDNGSIPHQIHLQEMRAIIRRQAEFYPFLADNQDRIEKILTFRIPYYVGPLARGKSDFAWLSRKSADKITPWNFDEIVDKESSAEAFINRMTNYDLYLPNQKVLPKHSLLYEKFTVYNELTKVKYKTEQGKTAFFDANMKQEIFDGVFKVYRKVTKDKLMDFLEKEFDEFRIVDLTGLDKENKAFNASYGTYHDLRKILDKDFLDNSKNEKILEDIVLTLTLFEDREMIRKRLENYSDLLTKEQVKKLERRHYTGWGRLSAELIHGIRNKESRKTLLDYLIDDGNSNRNFMQLINDDALSFKEEIAKAQVIGETDNLNQVVSDIAGSPAIKKGILQSLKIVDELVKIMGHQPENIVVEMARENQFTNQGRRNSQQRLKGLTDSIKEFGSQILKEHPVENSQLQNDRLFLYYLQNGRDMYTGEELDIDYLSQYDIDHIIPQAFIKDNSIDNRVLTSSKENRGKSDDVPSKDVVRKMKPYWSKLLSAKLITQRKFDNLTKAERGGLTDDDKAGFIKRQLVETRQITKHVARILDERFNTETDENNKKIRQVKIVTLKSNLVSNFRKEFELYKVREINDYHHAHDAYLNAVIGKALLGVYPQLEPEFVYGDYPHFHGHEENKATAKKFFYSNIMNFFKKDDVRTDKNGEIIWKKDEHISNIKKVLSYPQVNIVKKVEEQTGGFSKESILPKGNSDKLIPRKTKKFYWDTKKYGGFDSPIVAYSILVIADIEKGKSKKLKTVKALVGVTIMEKMTFERDPVAFLERKGYRNVQEENIIKLPKYSLFKLENGRKRLLASARELQKGNEIVLPNHLGTLLYHAKNIHKVDEPKHLDYVDKHKDEFKELLDVVSNFSKKYTLAEGNLEKIKELYAQNNGEDLKELSSSFINLLTFTAIGAPAAFKFFDKNIDRKRYTSTTEILNATLIHQSITGLYETRIDLSKLGGD

SEQ ID NO: 132 - protein, 1345 aa, Streptococcus mutans
MKKPYSIGLDIGTNSVGWAVVTDDYKVPAKKMKVLGNTDKSHIKKNLLGALLFDSGNTAEDRRLKRTARRRYTRRRNRILYLQEIFSEEMGKVDDSFFHRLEDSFLVTEDKRGERHPIFGNLEEEVKYHENFPTIYHLRQYLADNPEKVDLRLVYLALAHIIKFRGHFLIEGKFDTRNNDVQRLFQEFLAVYDNTFENSSLQEQNVQVEEILTDKISKSAKKDRVLKLFPNEKSNGRFAEFLKLIVGNQADFKKHFELEEKAPLQFSKDTYEEELEVLLAQIGDNYAELFLSAKKLYDSILLSGILTVTDVSTKAPLSASMIQRYNEHQMDLAQLKQFIRQKLSDKYNEVFSDVSKDGYAGYIDGKTNQEAFYKYLKGLLNKIEGSGYFLDKIEREDFLRKQRTFDNGSIPHQIHLQEMRAIIRRQAEFYPFLADNQDRIEKILTFRIPYYVGPLARGKSDFAWLSRKSADKITPWNFDEIVDKESSAEAFINRMTNYDLYLPNQKVLPKHSLLYEKFTVYNELTKVKYKTEQGKTAFFDANMKQEIFDGVFKVYRKVTKDKLMDFLEKEFDEFRIVDLTGLDKENKVFNASYGTYHDLCKILDKDFLDNSKNEKILEDIVLTLTLFEDREMIRKRLENYSDLLTKEQVKKLERRHYTGWGRLSAELIHGIRNKESRKTILDYLIDDGNSNRNFMQLINDDALSFKEEIAKAQVIGETDNLNQVVSDIAGSPAIKKGILQSLKIVDELVKIMGHQPENIVVEMARENQFTKQGRRNSQQRLKGLTDSIKEFGSQILKEHPVENSQLQNDRLFLYYLQNGRDMYTGEELDIDYLSQYDIDHIIPQAFIKDNSIDNRVLTSSKENRGKSDDVPSKDVVRKMKSYWSKLLSAKLITQRKFDNLTKAERGGLTDDDKAGFIKRQLVETRQITKHVARILDERFYTETDENNKKIRQVKIVTLKSNLVSNFRKEFELYKVREINDYHHAHDAYLNAVIGKALLGVYPQLEPEFVYGDYPHFHGHKENKATAKKFFYSNIMNFFKKDDVRTDRNGEIIWKKDEHISNIKKVLSYPQVNIVKKVEEQTGGFSKESILPKGNSDKLIPRKTKKFYWDTKKYGGFDSPIVAYSILVIADIEKGKSKKLKTVKALVGVTIMEKMTFERDPVAFLERKGYRNVQEENIIKLPKYSLFKLENGRKRLLASARELQKGNEIVLPNHLGTLLYHAKNIHKVDEPKHLDYVDKHKDEFKELLDVVSNFSKKYTLAEGNLEKIKELYAQNNGEDLKELASSFINLLTFTAIGAPATFKFFDKNIDRKRYTSTTEILNATLIHQSITGLYETRIDLSKLGGD

SEQ ID NO: 133 - protein, 1336 aa, Streptococcus mutans
MKKSYSIGLDIGTNSVGWAVVTDDYKVPAKKMKVLGNTDKSHIKKNLLGALLFDSGNTAEDRRLKRTARRRYTRRRNRILYLQEIFSEEMGKVDDSFFHRLDESFLTDDDKNFDSHPIFGNKAEEDAYHQKFPTIYHLRKHLADSTEKADLRLVYLALAHMIKFRGHFLIEGELNAENTDVQKLFADFVGVYDRTFDDSHLSEITVDASSILTEKISKSRRLEKLINNYPKEKKNTLFGNLIALSLGLQPNFKTNFKLSEDAKLQFSKDTYEEDLEELLGKIGDDYADLFTLAKNLYDAILLSGILTADDSSTKAPLSASMIKRYAEHHEDLEKLKEFIKANKPELYHDIFKDETKNGYAGYIENGVKQDEFYKYLKNTLSKIAGSDYFLDKIEREDFLRKQRTFDNGSIPHQIHLQEMHAILRRQGDYYPFLKENQDRIEKILTFRIPYYVGPLARKNSRFAWAEYHSDEAVMPWNFDQVIDKESSAQAFIEHMTNNDLYLPNEKVLPKHSPLYEKYTVYNELTKIKYVTEIGEAKFFDANLKQEIFDGLFKHERKVTKKKLRTFLDKNFDEFRIVDIQGLDKETETFNASYATYQDLLKVIKDKVFMDNPENAEILENIVLTLTLFEDREMIKQRLAKYADVFDKKVIDQLARRHYTGWGRLSAKLLNGIRDKQSCKTIMDYLIDDAQSNRNLMQLITDDNLTFKDDIVKAQYVDNSDDLHQVVQSLAGSPAIKKGILQSLKIVDELVKVMGKEPEQIVVEMARENQTTAKGRRNSQQRYKRLKEAIKDLNHKILKEHPTDNQALQNNRLFLYYLQNGRDMYTGESLDINRLSDYDIDHVIPQAFIKDNSIDNRVLTSSKANRGKSDDVPSEDVVNRMRPFWNKLLSSGLISQRKYNNLTKKELTPDDKAGFIKRQLVETRQITKHVARMLDERFNKEFDDNNKRIRRVKIVTLKSNLVSSFRKEFELYKVREINDYHHAHDAYLNAVVVKALLVKYPKLEPEFVYGEYPKYNSYRERKATQKMFFYSNIMNMFKSKVKLADDQIVERPMIEVNDETGEIAWDKTKHITTVKKVLSYPQVNIVKKVEEQTGGLFDPKSPLEKLVPLKKALNPEKYGGYQKPTTAYPILLIVDTKQLIPISVMDKKRFEQNPVKFLKDKGYQQIEKNNFVKLPKYTLVDIGNGIKRLWASSKEVHKGNQLVVSKKSQDLLYHAHHLDNDYSNEYVKNHYQQFDILFNEITSFSKKCKLGKEHIQKIEEAYSKERDSASIEELADGFIKLLGFTQLGATSPFSFLGIKLNQKQYTGKKDYLEATLIHQSITGLYETRIDLNKLGGD

SEQ ID NO: 134 - protein, 1345 aa, Streptococcus mutans
MKKPYSIGLDIGTNSVGWAVVTDDYKVPAKKMKVLGNTDKSHIKKNLLGALLFDSGNTAADRRLKRTARRRYTRRRNRILYLQEIFAEEMSKVDDSFFHRLEDSFLVTEDKRGERHPIFGNLEEEVKYHENFPTIYHLRQYLADNPEKVDLRLVYLALAHIIKFRGHFLIEGKFDTRNNDVQRLFQEFLAVYDNTFENSSLQEQNVQVEEILTDKISKSAKKDRVLKLFPNEKSNGRFAEFLKLIVGNQADFKKHFELEEKAPLQFSKDTYEEELEVLLAQIGDNYAELFLSAKKLYDSILLSGILTVTDVSTKAPLSASMIQRYNEHQMDLAQLKQFIRQKLSDKYNEVFSDVSKDGYAGYIDGKTNQEAFYKYLKGLLNKIEGSGYFLDKIEREDFLRKQRTFDNGSIPHQIHLQEMRAIIRRQAEFYPFLADNQDRIEKILTFRIPYYVGPLARGKSDFAWLSRKSADKITPWNFDEIVDKESSAEAFINRMTNYDLYLPNQKVLPKHSLLYEKFTVYNELTKVKYKTEQGKTAFFDANMKQEIFDGVFKVYRKVTKDKLMDFLEKEFDEFRIVDLTGLDKENKAFNASYGTYHDLRKILDKDFLDNSKNEKILEDIVLTLTLFEDREMIRKRLENYSDLLTKEQVKKLERRHYTGWGRLSAELIHGIRNKESRKTILDYLIDDGNSNRNFMQLINDDALSFKEEIAKAQVIGETDNLNQVVSDIAGSPAIKKGILQSLKIVDELVKIMGHQPENIVVEMARENQFTNQGRRNSQQRLKGLTDSIKEFGSQILKEHPVEHSQLQNDRLFLYYLQNGRDMYTGEELDIDYLSQYDIDHIIPQAFIKDNSIDNRVLTSSKENRGKSDDVPSKNVVRKMKSYWSKLLSAKLITQRKFDNLTKAERGGLTDDDKAGFIKRQLVETRQITKHVARILDERFHTETDENNKKIRQVKIVTLKSNLVSNFRKEFELYKVREINDYHHAHDAYLNAVIGKALLGVYPQLEPEFVYGDYPHFHGHKENKATAKKFFYSNIMNFFKKDDVRTDKNGEIIWKKDEHISNIKKVLSYPQVNIVKKVEEQTGGFSKESILPKGNSDKLIPRKTKKFYWDTKKYGGFDSPIVAYSILVIADIEKGKSKKLKTVKALVGVTIMEKMTFERDPVAFLERKGYRNVQEENIIKLPKYSLFKLENGRKRLLASARELQKGNEIVLPNHLGTLLYHAKNIHKVDEPKHLDYVDKHKDEFKELLDVVSNFSKKYTLAEGNLEKIKELYAQNNGEDLKELASSFINLLTFTAIGAPATFKFFDKNIDRKRYTSTTEILNATLIHQSITGLYETRIDLSKLGGD

SEQ ID NO: 135 - protein, 1345 aa, Streptococcus mutans
MKKPYSIGLDIGTNSVGWAVVTDDYKVPAKKMKVLGNTDKSHIEKNLLGALLFDSGNTAEDRRLKRTARRRYTRRRNRILYLQEIFSEEMGKVDDSFFHRLEDFFLVTEDKRGERHPIFGNLEEEVKYHENFPTIYHLRQYLADNPEKVDLRLVYLALAHIIKFRGHFLIEGKFDTRNNDVQRLFQEFLAVYDNTFENSSLQEQNVQVEEILTDKISKSAKKDRVLKLFPNEKSNGRFAEFLKLIVGNQADFKKHFELEEKAPLQFSKDTYEEELEVLLAQIGDNYAELFLSAKKLYDSILLSGILTADDSSTKAPLSASMIQRYNEHQMDLAQLKQFIRQKLSDKYNEVFSDVSKDGYAGYIDGKTNQEAFYKYLKGLLNKIEGSGYFLDKIEREDFLRKQRTFDNGSIPHQIHLQEMRAIIRRQSEFYPFLADNQDRIEKILTFRIPYYVGPLARGKSDFAWLSRKSADKITPWNFDEIVDKESSAEAFINRMTNYDLYLPNQKVLPKHSLLYEKFTVYNELTKVKYKTEQGETAFFDANMKQEIFDGVFKVYRKVTKDKLMDFLEKEFDEFRIVDLTGLDKENKAFNASYGTYHDLRKILDKDFLDNSKNEKILEDIVLTLTLFEDREMIRKRLKNYSDLLTKEQLKKLERRHYTGWGRLSAELIHGIRNKESRKTILDYLIDDGNSNRNFMQLINDDALSFKEEIAKAQVIGETDNLNQVVSDIAGSPAIKKGILQSLKIVDELVKIMGHQPENIVVEMARENQFTNQGRRNSQQRLKGLTDSIKEFGSQILKEHPVENSQLQNDRLFLYYLQNGRDMYTGEELDIDYLSQYDIDHIIPQAFIKDNSIDNRVLTSSKENRGKSDDVPSKDVVRKMKPYWSKLLSAKLITQRKFDNLTKAERGGLTDDDKAGFIKRQLVETRQITKHVARILDERFNTETDENNKKIRQVKIVTLKSNLVSNFRKEFELYKVREINDYHHAHDAYLNAVIGKALLGVYPQLEPEFVYGDYPHFHGHEENKATAKKFFYSNIMNFFKKDDVRTDKNGEIIWKKDEHISNIKKVLSYPQVNIVKKVEEQTGGFSKESILPKGNSDKLIPRKTKKFYWDTKKYGGFDSPIVAYSILVIADIEKGKSKKLKTVKALVGVTIMEKMTFERDPVAFLERKGYRNVQEENIIKLPKYSLFKLENGRKRLLASARELQKGNEIVLPNHLGTLLYHAKNIHKVDEPKHLDYVDKHKDEFKELLDVVSNFSKKYTLAEGNLEKIKELYAQNNGEDLKELASSFINLLTFTAIGAPATFKFFDKNIDRKRYTSTTEILNATLIHQSITGLYETRIDLSKLGGD

SEQ ID NO: 136 - protein, 1345 aa, Streptococcus mutans
MKKPYSIGLDIGTNSVGWAVVTDDYKVPAKKMKVLGNTDKSHIKKNLLGALLFDSGNTAEDRRLKRTARRRYTRRRNRILYLQEIFSEEMGKVDDSFFHRLDESFLTDDDKNFDSHPIFGNKAEEDAYHQKFPTIYHLRKHLADSTEKADLRLVYLALAHMIKFRGHFLIEGELNAENTDVQKLFADFVGVYDRTFDDSHLSEITVDASSILTEKISKSRRLEKLINNYPKEKKNTLFGNLIALSLGLQPNFKTNFKLSEDAKLQFSKDTYEEELEVLLAQIGDNYAELFLSAKKLYDSILLSGILTVTDVSTKAPLSASMIQRYNEHQMDLAQLKQFIRQKLSDKYNEVFSDVSKDGYAGYIDGKTNQEAFYKYLKGLLNKIEGSGYFLDKIEREDFLRKQRTFDNGSIPHQIHLQEMRAIIRRQAEFYPFLADNQDRIEKILTFRIPYYVGPLARGKSDFAWLSRKSADKITPWNFDEIVDKESSVEAFINRMTNYDLYLPNQKVLPKHSLLYEKFTVYNELTKVKYKTEQGKTAFFDANMKQEIFDGVFKVYRKVTKDKLMDFLEKEFDEFRIVDLTGLDKENKAFNASYGTYHDLRKILDKDFLDNSKNEKILEDIVLTLTLFEDREMIRKRLKNYSDLLTKEQLKKLERRHYTGWGRLSAELIHGIRNKESRKTILDYLIDDGNSNRNFMQLINDDALSFKEEIAKAQVIGETDNLNQVVSDIAGSPAIKKGILQSLKIVDELVKIMGHQPENIVVEMARENQFTNQGRRNSQQRLKGLTDSIKEFGSQILKEHPVENSQLQNDRLFLYYLQNGRDMYTGEELDIDYLSQYDIDHIIPQAFIKDNSIDNRVLTSSKENRGKSDDVPSKDVVRKMKSYWSKLLSAKLITQRKFDNLTKGERGGLTDDDKAGFIKRQLVETRQITKHVARILDERFNTETDENNKKIRQVKIVTLKSNLVSNFRKEFELYKVREINDYHHAHDAYLNAVIGKALLGVYPQLEPEFVYGDYPHFHGHKENKATAKKFFYSNIMNFFKKDDVRTDKNGEIIWKKDEYISNIKKVLSYPQVNIVKKVEEQTGGFSKESILPKGDSDKLIPRKTKKFYWDTKKYGGFDSPIVAYSILVIADIEKGKSKKLKTVKALVGVTIMEKMTFERDPVAFLERKGYRNVQEENIIKLPKYSLFKLENGRKRLLASARELQKGNEIVLPNHLGTLLYHAKNIHKVDEPKHLDYVDKHKDEFKELLDVVSNFSKKYTLAEGNLEKIKELYAQNNGEDLKELASSFINLLTFTAIGAPATFKFFDKNIDRKRYTSTTEILNATLIHQSITGLYETRIDLSKLGGD

SEQ ID NO: 137 - protein, 1345 aa, Streptococcus mutans
MKKPYSIGLDIGTNSVGWAVVTDDYKVPAKKMKVLGNTDKSHIKKNLLGALLFDSGNTAADRRLKRTARRRYTRRRNRILYLQEIFAEEMSKVDDSFFHRLEDSFLVTEDKRGERHPIFGNLEEEVKYHENFPTIYHLRQYLADNPEKVDLRLVYLALAHIIKFRGHFLIEGKFDTRNNDVQRLFQEFLAVYDNTFENSSLQEQNVQVEEILTDKISKSAKKDRVLKLFPNEKSNGRFAEFLKLIVGNQADFKKHFELEEKAPLQFSKDTYEEELEVLLAQIGDNYAELFLSAKKLYDSILLSGILTVTDVSTKAPLSASMIQRYNEHQMDLAQLKQFIRQKLSDKYNEVFSDVSKDGYAGYIDGKTNQEAFYKYLKGLLNKIEGSGYFLDKIEREDFLRKQRTFDNGSIPHQIHLQEMRAIIRRQAEFYPFLADNQDRIEKILTFRIPYYVGPLARGKSDFAWLSRKSADKITPWNFDEIVDKESSAEAFINRMTNYDLYLPNQKVLPKHSLLYEKFTVYNELTKVKYKTEQGKTAFFDANMKQEIFDGVFKVYRKVTKDKLMDFLEKEFDEFRIVDLTGLDKENKVFNASYGTYHDLCKILDKDFLDNSKNEKILEDIVLTLTLFEDREMIRKRLENYSDLLTKEQVKKLERRHYTGWGRLSAELIHGIRNKESRKTILDYLIDDGNSNRNFMQLINDDALSFKEEIAKAQVIGETDNLNQVVSDIAGSPAIKKGILQSLKIVDELVKIMGHQPENIVVEMARENQFTKQGRRNSQQRLKGLTDSIKEFGSQILKEHPVENSQLQNDRLFLYYLQNGRDMYTGEELDIDYLSQYDIDHIIPQAFIKDNSIDNRVLTSSKENRGKSDDVPSKDVVRKMKSYWSKLLSAKLITQRKFDNLTKAERGGLTDDDKAGFIKRQLVETRQITKHVARILDERFYTETDENNKKIRQVKIVTLKSNLVSNFRKEFELYKVREINDYHHAHDAYLNAVIGKALLGVYPQLEPEFVYGDYPHFHGHKENKATAKKFFYSNIMNFFKKDDVRTDKNGEIIWKKDEHISNIKKVLSYPQVNIVKKVEEQTGGFSKESILPKGNSDKLIPRKTKKFYWDTKKYGGFDSPIVAYSILVIADIEKGKSKKLKTVKALVGVTIMEKMTFERDPVAFLERKGYRNVQEENIIKLPKYSLFKLENGRKRLLASARELQKGNEIVLPNHLGTLLYHAKNIHKVDEPKHLDYVDKHKDEFKELLDVVSNFSKKYTLAEGNLEKIKELYAQNNGEDLKELASSFINLLTFTAIGAPATFKFFDKNIDRKRYTSTTEILNATLIHQSITGLYETRIDLSKLGGD

SEQ ID NO: 138 - protein, 1345 aa, Streptococcus mutans
MKKPYSIGLDIGTNSVGWAVVTDDYKVPAKKMKVLGNTDKSHIKKNLLGALLFDSGNTAADRRLKRTARRRYTRRRNRILYLQEIFAEEMSKVDDSFFHRLEDSFLVTEDKRGERHPIFGNLEEEVKYHENFPTIYHLRQYLADNPEKVDLRLVYLALAHIIKFRGHFLIEGKFDTRNNDVQRLFQEFLAVYDNTFENSSLQEQNVQVEEILTDKISKSAKKDRVLKLFPNEKSNGRFAEFLKLIVGNQADFKKHFELEEKAPLQFSKDTYEEELEVLLAQIGDNYAELFLSAKKLYDSILLSGILTVTDVSTKAPLSASMIQRYNEHQMDLAQLKQFIRQKLSDKYNEVFSDVSKDGYAGYIDGKTNQEAFYKYLKGLLNKIEGSGYFLDKIEREDFLRKQRTFDNGSIPHQIHLQEMRAIIRRQAEFYPFLADNQDRIEKILTFRIPYYVGPLARGKSDFAWLSRKSADKITPWNFDEIVDKESSAEAFINRMTNYDLYLPNQKVLPKHSLLYEKFTVYNELTKVKYKTEQGKTAFFDANMKQEIFDGVFKVYRKVTKDKLMDFLEKEFDEFRIVDLTGLDKENKAFNASYGTYHDLRKILDKDFLDNSKNEKILEDIVLTLTLFEDREMIRKRLENYSDLLTKEQVKKLERRHYTGWGRLSAELIHGIRNKESRKTILDYLIDDGNSNRNFMQLINDDALSFKEEIAKAQVIGETDNLNQVVSDIAGSPAIKKGILQSLKIVDELVKIMGHQPENIVVEMARENQFTNQGRRNSQQRLKGLTDSIKEFGSQILKEHPVENSQLQNDRLFLYYLQNGRDMYTGEELDIDYLSQYDIDHIIPQAFIKDNSIDNRVLTSSKENRGKSDDVPSKNVVRKMKSYWSKLLSAKLITQRKFDNLTKAERGGLTDDDKAGFIKRQLVETRQITKHVARILDERFHTETDENNKKIRQVKIVTLKSNLVSNFRKEFELYKVREINDYHHAHDAYLNAVIGKALLGVYPQLEPEFVYGDYPHFHGHKENKATAKKFFYSNIMNFFKKDDVRTDKNGEIIWKKDEHISNIKKVLSYPQVNIVKKVEEQTGGFSKESILPKGNSDKLIPRKTKKFYWDTKKYGGFDSPIVAYSILVIADIEKGKSKKLKTVKALVGVTIMEKMTFERDPVAFLERKGYRNVQEENIIKLPKYSLFKLENGRKRLLASARELQKGNEIVLPNHLGTLLYHAKNIHKVDEPKHLDYVDKHKDEFKELLDVVSNFSKKYTLAEGNLEKIKELYAQNNGEDLKELSSSFINLLTFTAIGAPAAFKFFDKNIDRKRYTSTTEILNATLIHQSITGLYETRIDLSKLGGD

SEQ ID NO: 139 - protein, 1336 aa, Streptococcus mutans
MKKPYSIGLDIGTNSVGWAVVTDDYKVPAKKMKVLGNTDKSHIKKNLLGALLFDSGNTAEDRRLKRTARRRYTRRRNRILYLQEIFAEEMSKVDDSFFHRLDESFLTDDDKNFDSHPIFGNKAEEDAYHQKFPTIYHLRKHLADSTEKADLRLVYLALAHMIKFRGHFLIEGELNAENTDVQKLFADFVGVYDRTFDDSHLSEITVDASSILTEKISKSRRLEKLINNYPKEKKNTLFGNLIALSLGLQPNFKTNFKLSEDAKLQFSKDTYEEDLEELLGKIGDDYADLFTLAKNLYDAILLSGILTADDSSTKAPLSASMIKRYAEHHEDLEKLKEFIKANKPELYHDIFKDETKNGYAGYIENGVKQDEFYKYLKNTLSKITGSDYFLDQIEREDFLRKQRTFDNGSIPHQIHLQEMHAILRRQGDYYPFLKENQDRIEKILTFRIPYYVGPLARKNSRFAWAEYHSDEAVTPWNFDQVIDKESSAQAFIEHMTNNDLYLPNEKVLPKHSPLYEKYTVYNELTKIKYVTEIGEAKFFDANLKQEIFDGLFKHERKVTKKKLRTFLDKNFDEFRIVDIQGLDKETETFNASYATYQDLLKVIKDKVFMDNPENAEILENIVLTLTLFEDREMIKQRLAKYADVFDKKVIDQLARRHYTGWGRLSAKLLNGIRDKQSCKTIMDYLIDDAQSNRNLMQLITDDNLTFKDDIVKAQYVDNSDDLHQVVQSLAGSPAIKKGILQSLKIVDELVKVMGKEPEQIVVEMARENQTTAKGRRNSQQRYKRLKEAIKDLNHKILKEHPTDNQALQNNRLFLYYLQNGRDMYTGESLDINRLSDYDIDHVIPQAFIKDNSIDNRVLTSSKANRGKSDDVPSEDVVNRMRPFWNKLLSSGLISQRKYNNLTKKELTLDDKAGFIKRQLVETRQITKHVARMLDERFNKEFDDNNKRIRRVKIVTLKSNLVSSFRKEFELYKVREINDYHHAHDAYLNAVVVKALLVKYPKLEPEFVYGEYPKYNSYRERKATQKMFFYSNIMNMFKSKVKLADDQIVERPMIEVNDETGEIAWDKTKHITTVKKVLSYPQVNIVKKVEEQTGGLFDPKSPLEKLVPLKKALNPEKYGGYQKPTTAYPILLIVDTKQLIPISVMDKKRFEQNPVKFLKDKGYQQIEKNNFVKLPKYTLVDIGNGIKRLWASSKEVHKGNQLVVSKKSQDLLYHAHHLDNDYSNEYVKNHYQQFDILFNEITSFSKKCKLGKEHIQKIEEAYSKERDFASIEELADGFIKLLGFTQLGATSPFSFLGIKLNQKQYTGKKDYLEATLIHQSITGLYETRIDLSKLGGD

SEQ ID NO: 140 - protein, 1345 aa, Streptococcus mutans
MKKPYSIGLDIGTNSVGWSVVTDDYKVPAKKMKVLGNTDKSHIEKNLLGALLFDSGNTAEDRRLKRTARRRYTRRRNRILYLQEIFSEEMGKVDDSFFHRLEDSFLVTEDKRGERHPIFGNLEEEVKYHENFPTIYHLRQYLADNPEKVDLRLVYLALAHIIKFRGHFLIEGKFDTRNNDVQRLFQEFLAVYDNTFENSSLQEQNVQVEEILTDKISKSAKKDRVLKLFPNEKSNGRFAEFLKLIVGNQADFKKHFELEEKAPLQFSKDTYEEELEVLLAQIGDNYAELFLSAKKLYDSILLSGILTVTDVGTKAPLSASMIQRYNEHQMDLAQLKQFIRQKLSDKYNEVFSDVSKDGYAGYIDGKTNQEAFYKYLKGLLNKIEGSGYFLDKIEREDFLRKQRTFDNGSIPHQIHLQEMRAIIRRQAEFYPFLADNQDRIEKLLTFRIPYYVGPLARGKSDFAWLSRKSADKITPWNFDEIVDKESSAEAFINRMTNYDLYLPNQKVLPKHSLLYEKFTVYNELTKVKYKTEQGKTAFFDANMKQEIFDGVFKVYRKVTKDKLMDFLEKEFDEFRIVDLTGLDKENKVFNASYGTYHDLCKILDKDFLDNSKNEKILEDIVLTLTLFEDREMIRKRLENYSDLLTKEQVKKLERRHYTGWGRLSAELIHGIRNKESRKTILDYLIDDGNSNRNFMQLINDDALSFKEEIAKAQVIGETDNLNQVVSDIAGSPAIKKGILQSLKIVDELVKIMGHQPENIVVEMARENQFTNQGRRNSQQRLKGLTDSIKEFGSQILKEHPVENSQLQNDRLFLYYLQNGRDMYTGEELDIDYLSQYDIDHIIPQAFIKDNSIDNRVLTSSKENRGKSDDVPSKDVVRKMKSYWSKLLSAKLITQRKFDNLTKAERGGLTDDDKAGFIKRQLVETRQITKHVARILDERFNTETDENNKKIRQVKIVTLKSNLVSNFRKEFELYKVREINDYHHAHDAYLNAVIGKALLGVYPQLEPEFVYGDYPHFHGHKENKATAKKFFYSNIMNFFKKDDVRIDKNGEIIWKKDEHISNIKKVLSYPQVNIVKKVEEQTGGFSKESILPKGNSDKLIPRKTKKFYWDTKKYGGFDSPIVAYSILVIADIEKGKSKKLKTVKALVGVTIMEKMTFERDPVAFLERKGYRNVQEENIIKLPKYSLFKLENGRKRLLASARELQKGNEIVLPNHLGTLLYHAKNIHKVDEPKHLDYVDKHKDEFKELLDVVSNFSKKYTLAEGNLEKIKELYAQNNGEDLKELASSFINLLTFTAIGAPATFKFFDKNIDRKRYTSTTEILNATLIHQSITGLYETRIDLSKLGGD

SEQ ID NO: 141 - protein, 1345 aa, Streptococcus mutans
MKKPYSIGLDIGTNSVGWAVVTDDYKVPAKKMKVLGNTDKSHIKKNLLGALLFDSGNTAEDRRLKRTARRRYTRRRNRILYLQEIFSEEMGKVDDSFFHRLEDSFLVTEDKRGERHPIFGNLEEEVKYHENFPTIYHLRQYLADNPEKTDLRLVYLALAHIIKFRGHFLIEGKFDTRNNDVQRLFQEFLAVYDNTFENSSLQEQNVQVEEILTDKISKSAKKDRVLKLFPNEKSNGRFAEFLKLIVGNQADFKKHFELEEKAPLQFSKDIYEEELEVLLAQIGDNYAELFLSAKKLYDSILLSGILTVTDVSTKAPLSASMIQRYNEHQMDLAQLKQFIRQKLSDKYNEVFSDVSKDGYAGYIDGKTNQEAFYKYLKGLLNKIEGSGYFLDKIEREDFLRKQRTFDNGSIPHQIHLQEMRAIIRRQAEFYPFLADNQDRIEKILTFRIPYYVGPLARGKSDFAWLSRKSADKITPWNFDEIVDKESSVEAFINRMTNYDLYLPNQKVLPKHSLLYEKFTVYNELTKVKYKTEQGKTAFFDANMKQEIFDGVFKVYRKVTKDKLMDFLEKEFDEFRIVDLTGLDKENKAFNASYGTYHDLRKILDKDFLDNSKNEKILEDIVLTLTLFEDREMIRKRLKNYSDLLTKEQLKKLERRHYTGWGRLSAELIHGIRNKESRKTILDYLIDDGNSNRNFMQLINDDALSFKEEIAKAQVIGETDNLNQVVSDIAGSPAIKKGILQSLKIVDELVKIMGHQPENIVVEMARENQFTNQGRRNSQQRLKGLTDSIKEFGSQILKEHPVENSQLQNDRLFLYYLQNGRDMYTGEELDIDYLSQYDIDHIIPQAFIKDNSIDNRVLTSSKENRGKSDDVPSKNVVRKMKSYWSKLLSAKLITQRKFDNLTKAERGGLTDDDKAGFIKRQLVETRQITKHVARILDERFHTETDENNKKIRQVKIVTLKSNLVSNFRKEFELYKVREINDYHHAHDAYLNAVIGKALLGVYPQLEPEFVYGDYPHFHGHKENKATAKKFFYSNIMNFFKKDDVRTDKNGEIIWKKDEHISNIKKVLSYPQVNIVKKVEEQTGGFSKESILPKGNSDKLIPRKTKKFYWDTKKYGGFDSPIVAYSILVIADIEKGKSKKLKTVKALVGVTIMEKMTFERDPVAFLERKGYRNVQEENIIKLPKYSLFKLENGRKRLLASARELQKGNEIVLPNHLGTLLYHAKNIHKVDEPKHLDYVDKHKDEFKELLDVVSNFSKKYTLAEGNLEKIKELYAQNNGEDLKELASSFINLLTFTAIGAPATFKFFDKNIDRKRYTSTTEILNATLIHQSITGLYETRIDLSKLGGD

SEQ ID NO: 142 - protein, 1345 aa, Streptococcus mutans
MKKPYSIGLDIGTNSVGWAVVTDDYKVSAKKMKVLGNTDKSHIKKNLLGALLFDSGNTAEDRRLKRTARRRYTRRRNRILYLQEIFAEEMSKVDDSFFHRLEDSFLVTEDKRGERHPIFGNLEEEVKYHENFPTIYHLRQYLADNPEKVDLRLVYLALAHIIKFRGHFLIEGKFDTRNNDVQRLFQEFLAVYDNTFENSSLQEQNVQVEEILTDKISKSAKKDRVLKLFPNEKSNGRFAEFLKLIVGNQADFKKHFELEEKAPLQFSKDTYEEELEVLLAQIGDNYAELFLSAKKLYDSILLSGILTVTDVSTKAPLSASMIQRYNEHQMDLAQLKQFIRQKLSDKYNEVFSDVSKDGYAGYIDGKTNQEAFYKYLKGLLNKIEGSGYFLDKIEREDFLRKQRTFDNGSIPHQIHLQEMRAIIRRQAEFYPFLADNQDRIEKILTFRIPYYVGPLARGKSDFAWLSRKSADKITPWNFDEIVDKESSAEAFINRMTNYDLYLPNQKVLPKHSLLYEKFTVYNELTKVKYKTEQGKTAFFDANMKQEIFDGVFKVYRKVTKDKLMDFLEKEFDEFRIVDLTGLDKENKAFNASYGTYHDLRKILDKDFLDNSKNEKILEDIVLTLTLFEDREMIRKRLENYSDLLTKEQVKKLERRHYTGWGRLSAELIHGIRNKESRKTILDYLIDDGNSNRNFMQLINDDALSFKEEIAKAQVIGETDNLNQVVSDIAGSPAIKKGILQSLKIVDELVKIMGHQPENIVVEMARENQFTNQGRRNSQQRLKGLTDSIKEFGSQILKEHPVEHSQLQNDRLFLYYLQNGRDMYTGEELDIDYLSQYDIDHIIPQAFIKDNSIDNRVLTSSKENRGKSDDVPSKNVVRKMKSYWSKLLSAKLITQRKFDNLTKAERGGLTDDDKAGFIKRQLVETRQITKHVARILDERFHTETDENNKKIRQVKIVTLKSNLVSNFRKEFELYKVREINDYHHTHDAYLNAVIGKALLGVYPQLEPEFVYGDYPHFHGHKENKATAKKFFYSNIMNFFKKDDVRTDKNGEIIWKKDEHISNIKKVLSYPQVNIVKKVEEQTGGFSKESILPKGNSDKLIPRKTKKFYWDTKKYGGFDSPIVAYSILVIADIEKGKSKKLKTVKALVGVTIMEKMTFERDPVAFLERKGYRNVQEENIIKLPKYSLFKLENGRKRLLASARELQKGNEIVLPNHLGTLLYHAKNIHKVDEPKHLDYVDKHKDEFKELLDVVSNFSKKYTLAEGNLEKIKELYAQNNGEDLKELASSFINLLTFTAIGAPATFKFFDKNIDRKRYTSTTEILNATLIHQSITGLYETRIDLSKLGGD

SEQ ID NO: 143 - protein, 1345 aa, Streptococcus mutans
MKKPYSIGLDIGTNSVGWAVVTDDYKVPAKKMKVLGNTDKSHIKKNLLGALLFDSGNTAEDRRLKRTARRRYTRRRNRILYLQEIFSEEMGKVDDSFFHRLEDSFLVTEDKRGERHPIFGNLEEEVKYHENFPTIYHLRQYLADNPEKTDLRLVYLALAHIIKFRGHFLIEGKFDTRNNDVQRLFQEFLAVYDNTFENSSLQEQNVQVEEILTDKISKSAKKDRVLKLFPNEKSNGRFAEFLKLIVGNQADFKKHFELEEKAPLQFSKDIYEEELEVLLAQIGDNYAELFLSAKKLYDSILLSGILTVTDVSTKAPLSASMIQRYNEHQMDLAQLKQFIRQKLSDKYNEVFSDVSKDGYAGYIDGKTNQEAFYKYLKGLLNKIEGSGYFLDKIEREDFLRKQRTFDNGSIPHQIHLQEMRAIIRRQAEFYPFLADNQDRIEKILTFRIPYYVGPLARGKSDFAWLSRKSADKITPWNFDEIVDKESSVEAFINRMTNYDLYLPNQKVLPKHSLLYEKFTVYNELTKVKYKTEQGKTAFFDANMKQEIFDGVFKVYRKVTKDKLMDFLEKEFDEFRIVDLTGLDKENKAFNASYGTYHDLRKILDKDFLDNSKNEKILEDIVLTLTLFEDREMIRKRLKNYSDLLTKEQLKKLERRHYTGWGRLSAELIHGIRNKESRKTILDYLIDDGNSNRNFMQLINDDALSFKEEIAKAQVIGETDNLNQVVSDIAGSPAIKKGILQSLKIVDELVKIMGHQPENIVVEMARENQFTNQGRRNSQQRLKGLTDSIKEFGSQILKEHPVENSQLQNDRLFLYYLQNGRDMYTGEELDIDYLSQYDIDHIIPQAFIKDNSIDNRVLTSSKENRGKSDDVPSKDVVRKMKSYWSKLLSAKLITQRKFDNLTKAERGGLTDDDKAGFIKRQLVETRQITKHVARILDERFNTETDENNKKIRQVKIVTLKSNLVSNFRKEFELYKVREINDYHHAHDAYLNAVIGKALLGVYPQLEPEFVYGDYPHFHGHKENKATAKKFFYSNIMNFFKKDDVRTDKNGEIIWKKDEHISNIKKVLSYPQVNIVKKVEEQTGGFSKESILPKGNSYKLIPRKTKKFYWDTKKYGGFDSPIVAYSILVIADIEKGKSKKLKTVKALVGVTIMEKMTFERDPVAFLERKGYRNVQEENIIKLPKYSLFKLENGRKRLLASARELQKGNEIVLPNHLGTLLYHAKNIHKVDEPKHLDYVDKHKDEFKELLDVVSNFSKKYTLAEGNLEKIKELYAQNNGEDLKELASSFINLLTFTAIGAPAAFKFFDKNIDRKRYTSTTEILNATLIHQSITGLYETRIDLSKLGGD

SEQ ID NO: 144 - protein, 1345 aa, Streptococcus mutans
MKKPYSIGLDIGTNSVGWAVVTDDYKVPAKKMKVLGNTDKSHIKKNLLGALLFDSGNTAEDRRLKRTTRRRYTRRRNRILYLQEIFSEEMGKVDDSFFHRLEDSFLVTEDKRGERHPIFGNLEEEVKYHENFPTIYHLRQYLADNPEKTDLRLVYLALAHIIKFRGHFLIEGKFDTRNNDVQRLFQEFLAVYDNTFENSSLQEQNVQVEEILTDKISKSAKKDRVLKLFPNEKSNGCFAEFLKLIVGNQADFKKHFELEEKAPLQFSKDTYEEELEVLLAQIGDNYAELFLSAKKLYDSILLSGILTVTDVSTKAPLSASMIQRYNEHQMDLTQLKQFIRQKLSDKYNEVFSDVSKDGYAGYIDGKTNQEAFYKYLKGLLNKIEGSGYFLDKIEREDFLRKQRTFDNGSIPHQIHLQEMRAIIRRQAEFYPFLADNQDRIEKLLTFRIPYYVGPLASGKSDFAWLSRKSADKITPWNFDEIVDKESSAEAFINRMTNYDLYLPNQKVLPKHSLLYEKFTVYNELTKVKYKTEQGKTAFFDANMKQEIFDGVFKVYRKVTKDKLMDFLEKEFDEFRIVDLTGLDKENKVFNASYGTYHDLCKILDKDFLDNSKNEKILEDIVLTLTLFEDREMIRKRLENYSDLLTKEQVKKLERRHYTGWGRLSAELIHGIRNKESRKTILDYLIDDGNSNRNFMQLINDDALSFKEEIAKAQVIGETDNLNQVVSDIAGSPAIKKGILQSLKIVDELVKIMGHQPENIVVEMARENQFTNQGRRNSQQRLKGLTDSIKEFGSQILKEHPVENSQLQNDRLFLYYLQNGRDMYTGEELDIDYLSQYDIDHIIPQAFIKDNSIDNRVLTSSKENRGKSDDVPSKDVVRKMKSYWSKLLSAKLITQRKFDNLTKAERGGLTDDDKAGFIKRQLVETRQITKHVARILDERFNTETDENNKKIRQVKIVTLKSNLVSNFRKEFELYKVREINDYHHAHDAYLNAVIGKALLGVYPQLEPEFVYGDYPHFHGHKENKATAKKFFYSNIMNFFKKDDVRTDKNGEIIWKKDEHISNIKKVLSYPQVNIVKKVEEQTGGFSKESILPKGNSDKLIPRKTKKFYWDTKKYGGFDSPIVAYSILVIADIEKGKSKKLKTVKALVGVTIMEKMTFERDPVAFLERKGYRNVQEENIIKLPKYSLFKLENGRKRLLASARELQKGNEIVLPNHLGTLLYHAKNIHKVDEPKHLDYVDKHKDEFKELLDVVSNFSKKYTLAEGNLEKIKELYAQNNGEDLKELASSFINLLTFTAIGAPATFKFFDKNIDRKRYTSTTEILNATLIHQSITGLYETRIDLSKLGGD

SEQ ID NO: 145 - protein, 1345 aa, Streptococcus mutans
MKKPYSIGLDIGTNSVGWAVVTDDYKVPAKKMKVLGNTDKSHIKKNLLGALLFDSGNTAEDRRLKRTARRRYTRRRNRILYLQEIFSEEMGKVDDSFFHRLEDSFLVTEDKRGERHPIFGNLEEEVKYHENFPTIYHLRQYLADNPEKTDLRLVYLALAHIIKFRGHFLIEGKFDTRNNDVQRLFQEFLAVYDNTFENSSLQEQNVQVEEILTDKISKSAKKDRVLKLFPNEKSNGRFAEFLKLIVGNQADFKKHFELEEKAPLQFSKDIYEEELEVLLAQIGDNYAELFLSAKKLYDSILLSGILTVTDVSTKAPLSASMIQRYNEHQMDLAQLKQFIRQKLSDKYNEVFSDVSKDGYAGYIDGKTNQEAFYKYLKGLLNKIEGSGYFLDKIEREDFLRKQRTFDNGSIPHQIHLQEMRAIIRRQAEFYPFLADNQDRIEKILTFRIPYYVGPLARGKSDFAWLSRKSADKITPWNFDEIVDKESSAEAFINRMTNYDLYLPNQKVLPKHSLLYEKFTVYNELTKVKYKTEQGKTAFFDANMKQEIFDGVFKVYRKVTKDKLMDFLEKEFDEFRIVDLTGLDKENKAFNASYGTYHDLRKILDKDFLDNSKNEKILEDIVLTLTLFEDREMIRKRLKNYSDLLTKEQLKKLERRHYTGWGRLSAELIHGIRNKESRKTILDYLIDDGNSNRNFMQLINDDALSFKEEIAKAQVIGETDNLNQVVSDIAGSLAIKKGILQSLKIVDELVKIMGHQPENIVVEMARENQFTNQGRRNSQQRLKGLTDSIKEFGSQILKEHPVENSQLQNDRLFLYYLQNGRDMYTGEELDIDYLSQYDIDHIIPQAFIKDNSIDNRVLTSSKENRGKSDDVPSKDVVRKMKSYWSKLLSAKLITQRKFDNLTKGERGGLTDDDKAGFIKRQLVETRQITKHVARILDERFNTETDENNKKIRQVKIVTLKSNLVSNFRKEFELYKVREINDYHHAHDAYLNAVIGKALLGVYPQLEPEFVYGDYPHFHGHKENKATAKKFFYSNIMNFFKKDDVRTDKNGEIIWKKDEYISNIKKVLSYPQVNIVKKVEEQTGGFFKESILPKGDSDKLIPRKTKKFYWDTKKYGGFDSPIVAYSILVIADIEKGKSKKLKTVKALVGVTIMEKMTFERDPVAFLERKGYRNVQEENIIKLPKYSLFKLENGRKRLLASARELQKGNEIVLPNHLGTLLYHAKNIHKVDEPKHLDYVDKHKDEFKELLDVVSNFSKKYTLAEGNLEKIKELYAQNNGEDLKELASSFINLLTFTAIGAPATFKFFDKNIDRKRYTSTTEILNATLIHQSITGLYETRIDLSKLGGD

SEQ ID NO: 146 - protein, 1345 aa, Streptococcus mutans
MKKPYSIGLDIGTNSVGWAVVTDDYKVPAKKMKVLGNTDKSHIKKNLLGALLFDSGNTAEDRRLKRTARRRYTRRRNRILYLQEIFSEEMGKVNDSFFHRLEDSFLVTEDKRGERHPIFGNLEEEVKYHENFPTIYHLRQYLADNPEKVDLRLVYLALAHIIKFRGHFLIEGKFDTRNNDVQRLFQEFLAVYDNTFENSSLQEQNVQVEEILTDKISKSAKKDRVLKLFPNEKSNGRFAEFLKLIVGNQADFKKHFELEEKAPLQFSKDTYEEELEVLLAQIGDNYAELFLSAKKLYDSILLSGILTVTDVSTKAPLSASMIQRYNEHQMDLAQLKQFIRQKLSDKYNEVFSDVSKDGYAGYIDGKTNQEAFYKYLKGLLNKIEGSGYFLDKIEREDFLRKQRTFDNGSIPHQIHLQEMRAIIRRQAEFYPFLADNQDRIEKILTFRIPYYVGPLARGKSDFAWLSRKSADKITPWNFDEIVDKESSAEAFINRMTNYDLYLPNQKVLPKHSLLYEKFTVYNELTKVKYKTEQGKTAFFDANMKQEIFDGVFKVYRKVTKDKLMDFLEKEFDEFRIVDLTGLDKENKVFNASYGTYHDLCKILDKDFLDNSKNEKILEDIVLTLTLFEDREMIRKRLENYSDLLTKEQVKKLERRHYTGWGRLSAELIHGIRNKESRKTILDYLIDDGNSNRNFMQLINDDALSFKEEIAKAQVIGETDNLNQVVSDIAGSPAIKKGILQSLKIVDELVKIMGHQPENIVVEMARENQFTKQGRRNSQQRLKGLTDSIKEFGSQILKEHPVENSQLQNDRLFLYYLQNGRDMYTGEELDIDYLSQYDIDHIIPQAFIKDNSIDNRVLTSSKENRGKSDDVPSKDVVRKMKSYWSKLLSAKLITQRKFDNLTKAERGGLTDDDKAGFIKRQLVETRQITKHVARILDERFYTETDENNKKIRQVKIVTLKSNLVSNFRKEFELYKVREINDYHHAHDAYLNAVIGKALLGVYPQLEPEFVYGDYPHFHGHKENKATAKKFFYSNIMNFFKKDDVRTDKNGEIIWKKDEYISNIKKVLSYPQVNIVKKVEEQTGGFSKESILPKGNSDKLIPRKTKKFYWDTKKYGGFDSPIVAYSILVIADIEKGKSKKLKTVKALVGVTIMEKMTFERDPIAFLERKGYRNVQEENIIKLPKYSLFKLENGRKRLLASARELQKGNEIVLPNHLGTLLYHAKNIHKVDEPKHLDYVDKHKDEFKELLDVVSNFSKKYTLAEGNLEKIKELYAQNNGEDLKELASSFINLLTFTAIGAPAAFKFFDKNIDRKRYTSTTEILNATLIHQSITGLYETRIDLSKLGGD

SEQ ID NO: 147 - protein, 1345 aa, Streptococcus mutans
MKKPYSIGLDIGTNSVGWAVVTDDYKVPAKKMKVLGNTDKSHIKKNLLGALLFDSGNTAEDRRLKRTARRRYTRRRNRILYLQEIFSEEMGKVDDSFFHRLEDSFLVTEDKRGERHPIFGNLEEEVKYHENFPTIYHLRQYLADNPEKTDLRLVYLALAHIIKFGGHFLIEGKFDTRNNDVQRLFQEFLAVYDNTFENSSLQEQNVQVEEILTDKISKSAKKDRVLKLFPNEKSNGRFAEFLKLIVGNQADFKKHFELEEKAPLQFSKDIYEEELEVLLAQIGDNYAELFLSAKKLYDSILLSGILTVTDVSTKAPLSASMIQRYNEHQMDLAQLKQFIRQKLSDKYNEVFSDVSKDGYAGYIDGKTNQEAFYKYLKGLLNKIEGSGYFLDKIEREDFLRKQRTFDNGSIPHQIHLQEMRAIIRRQAEFYPFLADNQDRIEKILTFRIPYYVGPLARGKSDFAWLSRKSADKITPWNFDEIVDKESSVEAFINRMTNYDLYLPNQKVLPKHSLLYEKFTVYNELTKVKYKTEQGKTAFFDANMKQEIFDGVFKVYRKVTKDKLMDFLEKEFDEFRIVDLTGLDKENKAFNASYGTYHDLRKILDKDFLDNSKNEKILEDIVLTLTLFEDREMIRKRLKNYSDLLTKEQLKKLERRHYTGWGRLSAELIHGIRNKESRKTILDYLIDDGNSNRNFMQLINDDALSFKEEIAKAQVIGETDNLNQVVSDIAGSPAIKKGILQSLKIVDELVKIMGHQPENIVVEMARENQFTNQGRRNSQQRLKGLTDSIKEFGSQILKEHPVENSQLQNDRLFLYYLQNGRDMYTGEELDIDYLSQYDIDHIIPQAFIKDNSIDNRVLTSSKENRGKSDDVPSKNVVRKMKSYWSKLLSAKLITQRKFDNLTKAERGGLTDDDKAGFIKRQLVETRQITKHVARILDERFHTETDENNKKIRQVKIVTLKSNLVSNFRKEFELYKVREINDYHHAHDAYLNAVIGKALLGVYPQLEPEFVYGDYPHFHGHKENKATAKKFFYSNIMNFFKKDDVRTDKNGEIIWKKDEHISNIKKVLSYPQVNIVKKVEEQTGGFSKESILPKGNSDKLIPRKTKKFYWDTKKYGGFDSPIVAYSILVIADIEKGKSKKLKTVKALVGVTIMEKMTFERDPVAFLERKGYRNVQEENIIKLPKYSLFKLENGRKRLLASARELQKGNEIVLPNHLGTLLYHAKNIHKVDEPKHLDYVDKHKDEFKELLDVVSNFSKKYTLAEGNLEKIKELYAQNNGEDLKELASSFINLLTFTAIGAPATFKFFDKNIDRKRYTSTTEILNATLIHQSITGLYETRIDLSKLGGD

SEQ ID NO: 148 - protein, 1345 aa, Streptococcus mutans
MKKPYSIGLDIGTNSVGWAVVTDDYKVPAKKMKVLGNTDKSHIKKNLLGALLFDSGNTAEDRRLKRTARRRYTRRRNRILYLQEIFAEEMMQVDESFFQRLDDSFLVEEDKRGSRYPIFGTLKEEKKYHKEFKTIYHLREKLANSTEKADLRLVYLSLAHMIKFRGHFLIEGQLKAENTNVQALFKDFVEVYDKTVEESHLSEMTVDALSILTEKVSKSRRLENLVECYPTEKKNTLFGNLIALSLGLQPNFKTNFQLSEDAKLQFSKDTYEEDLEGLLGEIGDEYADLFASAKNLYDAILLSGILAVDDNTTKAPLSASMVKRYKEHKEELAAFKRFIKEKLPKKYEEIFKDDTKNGYAGYVGADATEEEFYKYVKGILNKVEGADVWLDKIDREDFLRKQRTFDNGSIPHQIHLQEMHAILRRQGEHYPFLKENQDKIEKILTFRIPYYVGPLVRKGSRFAWAEYKADEKITPWNFDDILDKEKSAEKFITRMTLNDLYLPEEKVLPKHSLLYETFTVYNELTKVKYVNEQGEAKFFDANMKQEIFDHVFKENRKVTKDKLLNYLNKEFEEFRIVNLTGLDKENKVFNSSLGTYHDLRKILNKSFLDNKENEQIIEDIIQTLTLFEDREMIRQRLQKYSDIFTKAQLKKLERRHYTGWGRLSYKLINGIRDKQSNKTILGYLIDDGYSNRNFMQLINDDALSFKEEIAKAQVIGEMDGLNQVVSDIAGSPAIKKGILQSLKIVDELVKVMGHNPANIVIEMARENQTTAKGRRSSQKRYKRLEEAIKDLNHKILKEHPTDNQALQNDRLFLYYLQNGRDMYTEDPLDINRLSDYDIDHIIPQAFIKDNSIDNRVLTRSDKNRGKSDDVPSEEVVHKMKPFWSKLLSAKLITQRKFDNLTKAERGGLTDDDKAGFIKRQLVETRQITKHVARILDERFNTETDENNKKIRQVKIVTLKSNLVSNFRKEFELYKVREINDYHHAHDAYLNAVIGKALLGVYPQLEPEFVYGDYPHFHGHKENKATAKKFFYSNIMNFFKKGDVRTDKNGEIIWKKDEHISNIKKVLSYPQVNIVKKVEEQTGGFSKESILPKGNSDKLIPRKTKKFYWDTKKYGGFDSPIVAYSILVIADIEKGKSKKLKTVKALVGVTIMEKMTFERDPVAFLERKGYRNVQEENIIKLPKYSLFKLENGRKRLLASARELQKGNEIVLPNHLETLLYHAKNIHKVDEPKHLDYVDKHKDEFKELLDVVSNFSKKYTLAEGNLEKIKELYAQNNGEDLKELASSFINLLTFTAIGAPAAFKFFDKNIDRKRYTSTTEILNATLIHQSITGLYETRIDLNKLGGD

SEQ ID NO: 149 - protein, 1345 aa, Streptococcus mutans
MKKPYSIGLDIGTNSVGWAVVTDDYKVPAKKMKVLGNTDKSHIKKNLLGALLFDSGNTAEDRRLKRTARRRYTRRRNRILYLQEIFSEEMDKVDDSFFHRLEDSFLVTEDKRGERHPIFGNLEEEVKYHENFPTIYHLRQYLADNPEKVDLRLVYLALAHIIKFRGHFLIEGKFDTRNNDVQRLFQEFLAVYDNTFENSSLQEQNVQVEEILTDKISKSAKKDRVLKLFPNEKSNGRFAEFLKLIVGNQADFKKHFELEEKAPLQFSKDTYEEELEVLLAQIGDNYAELFLSAKKLYDSILLSGILTVTDVSTKAPLSASMIQRYNEHQMDLAQLKQFIRQKLSDKYNEVFSDVSKDGYAGYIDGKTNQEAFYKYLKGLLNKIEGSGYFLDKIEREDFLRKQRTFDNGSIPHQIHLQEMRAIIRRQAEFYPFLADNQDRIEKILTFRIPYYVGPLARGKSDFAWLSRKSADKITPWNFDEIVDKESSAEAFINRMTNYDLYLPNQKVLPKHSLLYEKFTVYNELTKVKYKTEQGKTAFFDANMKQEIFDGVFKVYRKVTKDKLMDFLEKEFDEFRIVDLTGLDKENKVFNASYGTYHDLCKILDKDFLDNSKNEKILEDIVLTLTLFEDREMIRKRLENYSDLLTKEQVKKLERRHYTGWGRLSAELIHGIRNKESRKTILDYLIDDGNSNRNFMQLINDDALSFKEEIAKAQVIGETDNLNQVVSDIAGSPAIKKGILQSLKIVDELVKIMGHQPENIVVEMARENQFTKQGRRNSQQRLKGLTDSIKEFGSQILKEHPVENSQLQNDRLFLYYLQNGRDMYTGEELDIDYLSQYDIDHIIPQAFIKDNSIDNRVLTSSKENRGKSDDVPSKDVVRKMKSYWSKLLSAKLITQRKFDNLTKAERGGLTDDDKAGFIKRQLVETRQITKHVARILDERFYTETDENNKKIRQVKIVTLKSNLVSNFRKEFELYKVREINDYHHAHDAYLNAVIGKALLGVYPQLEPEFVYGDYPHFHGHKENKATAKKFFYSNIMNFFKKDDVRTDKNGEIIWKKDEHISNIKKVLSYPQVNIVKKVEEQTGGFSKESILPKGNSDKLIPRKTKKFYWDTKKYGGFDSPIVAYSILVIADIEKGKSKKLKTVKALVGVTIMEKMTFERDPVAFLERKGYRNVQEENIIKLPKYSLFKLENGRKRLLASARELQKGNEIVLPNHLGTLLYHAKNIHKVDEPKHLDYVDKHKDEFKELLDVVSNFSKKYTLAEGNLEKIKELYAQNNGEDLKELASSFINLLTFTAIGAPATFKFFDKNIDRKRYTSTTEILNATLIHQSITGLYETRIDLSKLGGD

SEQ ID NO: 150 - protein, 1345 aa, Streptococcus mutans
MKKPYSIGLDIGTNSVGWAVVTDDYKVPAKKMKVLGNTDKSHIKKNLLGALLFDSGNTAEDRRLKRTARRRYTRRRNRILYLQEIFSEEMGKVDDSFFHRLEDSFLVTEDKRGERHPIFGNLEEEVKYHENFPTIYHLRQYLADNPEKVDLRLVYLALAHIIKFRGHFLIEGKFDTRNNDVQKLFQEFLAVYDNTFENSSLQEQNVQVEEILTDKISKSAKKDRVLKLFPNEKSNGRFAEFLKLIVGNQADFKKHFELEEKAPLQLSKDTYEEELEVLLAQIGDNYAELFLSAKKLYDSILLSGILTVTDVSTKAPLSASMIQRYNEHQMDLAQLKQFIRQKLSDKYNEVFSDVSKDGYAGYIDGKTNQEAFYKYLKGLLNKIEGSGYFLDKIEREDFLRKQRTFDNGSIPHQIHLQEMRAIIRRQAEFYPFLADNQDRIEKILTFRIPYYVGPLARGKSDFAWLSRKSADKITPWNFDEIVDKESSVEAFINRMTNYDLYLPNQKVLPKHSLLYEKFTVYNELTKVKYKTEQGKTAFFDANMKQEIFDGVFKVYRKVTKDKLMDFLEKEFDEFRIVDLTGLDKENKAFNASYGTYHDLRKILDKDFLDNSKNEKILEDIVLTLTLFEDREMIRKRLENYSDLLTKEQVKKLERRHYTGWGRLSAELIHGIRNKESRKTLLDYLIDDGNSNRNFMQLINDDALSFKEEIAKAQVIGETDNLNQVVSDIAGSPAIKKGILQSLKIVDELVKIMGHQPENIVVEMARENQFTNQGRRNSQQRLKGLTDSIKEFGSQILKEHPVENSQLQNDRLFLYYLQNGRDMYTGEELDIDYLSQYDIDHIIPQAFIKDNSIDNRVLTSSKENRGKSDDVPSKDVVRKMKSYWSKLLSAKLITQRKFDNLTKAERGGLTDDDKAGFIKRQLVETRQITKHVARILDERFNTETDENNKKIRQVKIVTLKSNLVSNFRKEFELYKVREINDYHHAHDAYLNAVIGKALLGVYPQLEPEFVYGDYPHFHGHKENKATAKKFFYSNIMNFFKKDDVRTDKNGEIIWKKDEYISNIKKVLSYPQVNIVKKVEEQTGGFSKESILPKGNSDKLIPRKTKKFYWDTKKYGGFDSPIVAYSILVIADIEKGKSKKLKTVKALVGVTIMEKMTFERDPIAFLERKGYRNVQEENIIKLPKYSLFKLENGRKRLLASARELQKGNEIVLPNHLGTLLYHAKNIHKVDEPKHLDYVDKHKDEFKELLDVVSNFSKKYTLAEGNLEKIKELYAQNNGEDLKELASSFINLLTFTAIGAPATFKFFDKNIDRKRYTSTTEILNATLIHQSITGLYETRIDLSKLGGD

SEQ ID NO: 151 - protein, 1345 aa, Streptococcus mutans
MKKPYSIGLDIGTNSVGWAVVTDDYKVPAKKMKVLGNTDKSHIKKNLLGALLFDSGNTAEDRRLKRTARRRYTRRRNRILYLQEIFSEEMGKVDDSFFHRLEDSFLVTEDKRGERHPIFGNLEEEVKYHENFPTIYHLRQYLADNPEKTDLRLVYLALAHIIKFRGHFLIEGKFDTRNNDVQRLFQEFLAVYDNTFENSSLQEQNVQVEEILTDKISKSAKKDRVLKLFPNEKSNGRFAEFLKLIVGNQADFKKHFELEEKAPLQFSKDIYEEELEVLLAQIGDNYAELFLSAKKLYDSILLSGILTVTDVSTKAPLSASMIQRYNEHQMDLAQLKQFIRQKLSDKYNEVFSDVSKDGYAGYIDGKTNQEAFYKYLKGLLNKIEGSGYFLDKIEREDFLRKQRTFDNGSIPHQIHLQEMRAIIRRQAEFYPFLADNQDRIEKILTFRIPYYVGPLARGKSDFAWLSRKSADKITPWNFDEIVDKESSAEAFINRMTNYDLYLPNQKVLPKHSLLYEKFTVYNELTKVKYKTEQGKTAFFDANMKQEIFDGVFKVYRKVTKDKLMDFLEKEFDEFRIVDLTGLDKENKAFNASYGTYHDLRKILDKDFLDNSKNEKILEDIVLTLTLFEDREMIRKRLKNYSDLLTKEQLKKLERRHYTGWGRLSAELIHGIRNKESRKTILDYLIDDGNSNRNFMQLINDDALSFKEEIAKAQVIGETDNLNQVVSDIAGSLAIKKGILQSLKIVDELVKIMGHQPENIVVEMARENQFTNQGRRNSQQRLKGLTDSIKEFGSQILKEHPVENSQLQNDRLFLYYLQNGRDMYTGEELDIDYLSQYDIDHIIPQAFIKDNSIDNRVLTSSKENRGKSDDVPSKDVVRKMKSYWSKLLSAKLITQRKFDNLTKGERGGLTDDDKAGFIKHQLVETRQITKHVARILDERFNTETDENNKKIRQVKIVTLKSNLVSNFRKEFELYKVREINDYHHAHDAYLNAVIGKALLGVYPQLEPEFVYGDYPHFHGHKENKATAKKFFYSNIMNFFKKDDVRTDKNGEIIWKKDEYISNIKKVLSYPQVNIVKKVEEQTGGFFKESILPKGDSDKLIPRKTKKFYWDTKKYGGFDSPIVAYSILVIADIEKGKSKKLKTVKALVGVTIMEKMTFERDPVAFLERKGYRNVQEENIIKLPKYSLFKLENGRKRLLASARELQKGNEIVLPNHLGTLLYHAKNIHKVDEPKHLDYVDKHKDEFKELLDVVSNFSKKYTLAEGNLEKIKELYAQNNGEDLKELASSFINLLTFTAIGAPATFKFFDKNIDRKRYTSTTEILNATLIHQSITGLYETRIDLSKLGGD

SEQ ID NO: 152 - protein, 1345 aa, Streptococcus mutans
MKKPYSIGLDIGTNSVGWAVVTDDYKVPAKKMKVLGNTDKSHIKKNLLGALLFDSGNTAEDRRLKRTARRRYTRRRNRILYLQEIFSEEMGKVDDSFFHRLEDSFLVTEDKRGERHPIFGNLEEEVKYHENFPTIYHLRQYLADNPEKTDLRLVYLALAHIIKFRGHFLIEGKFDTRNNDVQRLFQEFLAVYDNTFENSSLQEQNVQVEEILTDKISKSAKKDRVLKLFPNEKSNGRFAEFLKLIVGNQADFKKHFELEEKAPLQFSKDIYEEELEVLLAQIGDNYAELFLSAKKLYDSILLSGILTVTDVSTKAPLSASMIQRYNEHQMDLAQLKQFIRQKLSDKYNEVFSDVSKDGYAGYIDGKTNQEAFYKYLKGLLNKIEGSGYFLDKIEREDFLRKQRTFDNGSIPHQIHLQEMRAIIRRQAEFYPFLADNQDRIEKILTFRIPYYVGPLARGKSDFAWLSRKSADKITPWNFDEIVDKESSAEAFINRMTNYDLYLPNQKVLPKHSLLYEKFTVYNELTKVKYKTEQGKTAFFDANMKQEIFDGVFKVYRKVTKDKLMDFLEKEFDEFRIVDLTGLDKENKAFNASYGTYHDLRKILDKDFLDNSKNEKILEDIVLTLTLFEDREMIRKRLENYSDLLTKEQVKKLERRHYTGWGRLSAELIHGIRNKESRKTLLDYLIDDGNSNRNFMQLINDDALSFKEEIAKAQVIGETDNLNQVVSDIAGSPAIKKGILQSLKIVDELVKIMGHQPENIVVEMARENQFTNQGQRNSQQRLKGLTDSIKEFGSQILKEHPVENSQLQNDRLFLYYLQNGRDMYTGEELDIDYLSQYDIDHIIPQAFIKDNSIDNRVLTSSKENRGKSDDVPSKDVVRKMKSYWSKLLSAKLITQRKFDNLTKAERGGLTDDDKAGFIKRQLVETRQITKHVARILDERFNTETDENNKKIRQVKIVTLKSNLVSNFRKEFELYKVREINDYHHAHDAYLNAVIGKALLGVYPQLEPEFVYGDYPHFHGHKENKATAKKFFYSNIMNFFKKDDVRTDKNGEIIWKKDEYISNIKKVLSYPQVNIVKKVEEQTGGFSKESILPKGDSDKLIPRKTKKFYWDTKKYGGFDSPIVAYSILVIADIEKGKSKKLKTVKALVGVTIMEKMTFERDPVAFLERKGYRNVQEENIIKLPKYSLFKLENGRKRLLASARELQKGNEIVLPDHLGTLLYHAKNIHKVDEPKHLDYVDKHKDEFKELLDVVSNFSKKYTLAEGNLEKIKELYAQNNGEDLKELASSFINLLTFTAIGAPATFKFFDKNIDRKRYTSTTEILNATLIHQSITGLYETRIDLSKLGGD

SEQ ID NO: 153 - protein, 1345 aa, Streptococcus mutans
MKKPYSIGLDIGTNSVGWAVVTDDYKVPAKKMKVLGNTDKSHIKKNLLGALLFDSGNTAADRRLKRTARRRYTRRRNRILYLQEIFAEEMSKVDDSFFHRLEDSFLVTEDKRGERHPIFGNLEEEVKYHENFPTIYHLRQYLADNPEKVDLRLVYLALAHIIKFRGHFLIEGKFDTRNNDVQRLFQEFLAVYDNTFENSSLQEQNVQVEEILTDKISKSAKKDRVLKLFPNEKSNGRFAEFLKLIVGNQADFKKHFELEEKAPLQFSKDTYEEELEVLLAQIGDNYAELFLSAKKLYDSILLSGILTVTDVSTKAPLSASMIQRYNEHQMDLAQLKQFIRQKLSDKYNEVFSDVSKDGYAGYIDGKTNQEAFYKYLKGLLNKIEGSGYFLDKIEREDFLRKQRTFDNGSIPHQIHLQEMRAIIRRQAEFYPFLADNQDRIEKILTFRIPYYVGPLARGKSDFAWLSRKSADKITPWNFDEIVDKESSAEAFINRMTNYDLYLPNQKVLPKHSLLYEKFTVYNELTKVKYKTEQGKTAFFDANMKQEIFDGVFKVYRKVTKDKLMDFLEKEFDEFRIVDLTGLDKENKAFNASYGTYHDLRKILDKDFLDNSKNEKILEDIVLTLTLFEDREMIRKRLENYSDLLTKEQVKKLERRHYTGWGRLSAELIHGIRNKESRKTILDYLIDDGNSNRNFMQLINDDALSFKEEIAKAQVIGETDNLNQVVSDIAGSPAIKKGILQSLKIVDELVKIMGHQPENIVVEMARENQFTNQGRRNSQQRLKGLTDSIKEFGSQILKEHPVKHSQLQNDRLFLYYLQNGRDMYTGEELDIDYLSQYDIDHIIPQAFIKDNSIDNRVLTSSKENRGKSDDVPSKNVVRKMKSYWSKLLSAKLITQRKFDNLTKAERGGLTDDDKAGFIKRQLVETRQITKHVARILDERFHTETDENNKKIRQVKIVTLKSNLVSNFRKEFELYKVREINDYHHAHDAYLNAVIGKALLGVYPQLEPEFVYGDYPHFHGHKENKATAKKFFYSNIMNFFKKDDVRTDKNGEIIWKKDEHISNIKKVLSYPQVNIVKKVEEQTGGFSKESILPKGNSDKLIPRKTKKFYWDTKKYGGFDSPIVAYSILVIADIEKGKSKKLKTVKALVGVTIMEKMTFERDPVAFLERKGYRNVQEENIIKLPKYSLFKLENGRKRLLASARELQKGNEIVLPNHLGTLLYHAKNIHKVDEPKHLDYVDKHKDEFKELLDVVSNFSKKYTLAEGNLEKIKELYAQNNGEDLKELASSFINLLTFTAIGAPATFKFFDKNIDRKRYTSTTEILNATLIHQSITGLYETRIDLSKLGGD

SEQ ID NO: 154 - protein, 1345 aa, Streptococcus mutans
MKKPYSIGLDIGTNSVGWAVVTDDYKVPDKKMKVLGNTDKSHIKKNLLGALLFDSGNTAEDRRLKRTARRRYTRRRNRILYLQEIFSEEMGKVDDSFFHRLEDSFLVTEDKRGERHPIFGNLEEEVKYHENFPTIYHLRQYLADNPEKTDLRLVYLALAHIIKFRGHFLIEGKFDTRNNDVQRLFQEFLAVYDNTFENSSLQEQNVQVEEILTDKISKSAKKDRVLKLFPNEKSNGRFAEFLKLIVGNQADFKKHFELEEKAPLQFSKDIYEEELEVLLAQIGDNYAELFLSAKKLYDSILLSGILTVTDVSTKAPLSASMIQRYNEHQMDLAQLKQFIRQKLSDKYNEVFSDVSKDGYAGYIDGKTNQEAFYKYLKGLLNKIEGSGYFLDKIEREDFLRKQRTFDNGSIPHQIHLQEMRAIIRRQAEFYPFLADNQDRIEKILTFRIPYYVGPLARGKSDFAWLSRKSADKITPWNFDEIVDKESSVEAFINRMTNYDLYLPNQKVLPKHSLLYEKFTVYNELTKVKYKTEQGKTAFFDANMKQEIFDGVFKVYRKVTKDKLMDFLEKEFDEFRIVDLTGLDKENKAFNASYGTYHDLRKILDKDFLDNSKNEKILEDIVLTLTLFEDREMIRKRLKNYSDLLTKEQLKKLERRHYTGWGRLSAELIHGIRNKESRKTILDYLIDDGNSNRNFMQLINDDALSFKEEIAKAQVIGETDNLNQVVSDIAGSPAIKKGILQSLKIVDELVKIMGHQPENIVVEMARENQFTNQGRRNSQQRLKGLTDSIKEFGSQILKEHPVENSQLQNDRLFLYYLQNGRDMYTGEELDIDYLSQYDIDHIIPQAFIKDNSIDNRVLTSSKENRGKSDDVPSKDVVRKMKSYWSKLLSAKLITQRKFDNLTKAERGGLTDDDKAGFIKRQLVETRQITKHVARILDERFYTETDENNKKIRQVKIVTLKSNLVSNFRKEFELYKVREINDYHHAHDAYLNAVIGKALLGVYPQLEPEFVYGDYPHFHGHKENKATAKKFFYSNIMNFFKKDDVRTDKNGEIIWKKDEHISNIKKVLSYPQVNIVKKVEEQTGGFSKESILPKGNSDKLIPRKTKKFYWDTKKYGGFDSPIVAYSILVIADIEKGKSKKLKTVKALVGVTIMEKMTFERDPVAFLERKGYRNVQEENIIKLPKYSLFKLENGRKRLLASARELQKGNEIVLPNHLGTLLYHAKNIHKVDEPKHLDYVDKHKDEFKELLDVVSNFSKKYTLAEGNLEKIKELYAQNNGEDLKELASSFINLLTFTAIGAPATFKFFDKNIDRKRYTSTTEILNATLIHQSITGLYETRIDLSKLGGD

SEQ ID NO: 155 - protein, 1345 aa, Streptococcus mutans
MKKPYSIGLDIGTNSVGWAVVTDDYKVPAKKMKVLGNTDKSHIKKNLLGALLFDSGNTAADRRLKRTARRRYTRRRNRILYLQEIFAEEMSKVDDSFFHRLEDSFLVTEDKRGERHPIFGNLEEEVKYHENFPTIYHLRQYLADNPEKVDLRLVYLALAHIIKFRGHFLIEGKFDTRNNDVQRLFQEFLAVYDNTFENSSLQEQNVQVEEILTDKISKSAKKDRVLKLFPNEKSNGRFAEFLKLIVGNQADFKKHFELEEKAPLQFSKDTYEEELEVLLAQIGDNYAELFLSAKKLYDSILLSGILTVTDVSTKAPLSASMIQRYNEHQMDLAQLKQFIRQKLSDKYNEVFSDVSKDGYAGYIDGKTNQEAFYKYLKGLLNKIEGSGYFLDKIEREDFLRKQRTFDNGSIPHQIHLQEMRAIIRRQAEFYPFLADNQDRIEKILTFRIPYYVGPLARGKSDFAWLSRKSADKITPWNFDEIVDKESSAEAFINRMTNYDLYLPNQKVLPKHSLLYEKFTVYNELTKVKYKTEQGKTAFFDANMKQEIFDGVFKVYRKVTKDKLMDFLEKEFDEFRIVDLTGLDKENKAFNASYGTYHDLRKILDKDFLDNSKNEKILEDIVLTLTLFEDREMIRKRLENYSDLLTKEQVKKLERRHYTGWGRLSAELIHGIRNKESRKTILDYLIDDGNSNRNFMQLINDDALSFKEEIAKAQVIGETDNLNQVVSDIAGSPAIKKGILQSLKIVDELVKIMGHQPENIVVEMARENQFTNQGRRNSQQRLKGLTDSIKEFGSQILKEHPVENSQLQNDRLFLYYLQNGRDMYTGEELDIDYLSQYDIDHIIPQAFIKDNSIDNRVLTSSKENRGKSDDVPSKNVVRKMKSYWSKLLSAKLITQRKFDNLTKAERGGLTDDDKAGFIKRQLVETRQITKHVARILDERFHTETDENNKKIRQVKIVTLKSNLVSNFRKEFELYKVREINDYHHAHDAYLNAVIGKALLGVYPQLEPEFVYGDYPHFHGHKENKATAKKFFYSNIMNFFKKDDVRTDKNGEIIWKKDEHISNIKKVLSYPQVNIVKKVEEQTGGFSKESILPKGNSDKLIPRKTKKFYWDTKKYGGFDSPIVAYSILVIADIEKGKSKKLKTVKALVGVTIMEKMTFERDPVAFLERKGYRNVQEENIIKLPKYSLFKLENGRKRLLASARELQKGNEIVLPNHLGTLLYHAKNIHKVDEPKHLDYVDKHKDEFKELLDVVSNFSKKYTLAEGNLEKIKELYAQNNGEDLKELASSFINLLTFTAIGAPATFKFFDKNIDRKRYTSTTEILNATLIHQSITGLYETRIDLSKLGGD

SEQ ID NO: 156 - protein, 1345 aa, Streptococcus mutans
MKKPYSIGLDIGTNSVGWAVVTDDYKVPAKKMKVLGNTDKSHIEKNLLGALLFDSGNTAEDRRLKRTARRRYTRRRNRILYLQEIFSEEMGKVDDSFFHRLEDSFLVTEDKRGERHPIFGNLEEEVKYHENFPTIYHLRQYLADNPEKVDLRLVYLALAHIIKFRGHFLIEGKFDTRNNDVQRLFQEFLAVYDNTFENSSLQEQNVQVEEILTDKISKSAKKDRVLKLFPNEKSNGRFAEFLKLIIGNQADFKKHFELEEKAPLQFSKDTYEEELEVLLAQIGDNYAELFLSAKKLYDSILLSGILTVTDVGTQAPLSASMIQRYNEHQMDLAQLKQFIRQKLSDKYNEVFSDVSKDGYAGYIDGKTNQEAFYKYLKGLLNKIEGSGYFLDKIEREDFLRKQRTFDNGSIPHQIHLQEMRAIIRRQAEFYPFLADNQDRIEKLLTFRIPYYVGPLARGKSDFAWLSRKSADKITPWNFDEIVDKESSAEAFINRMTNYDLYLPNQKVLPKHSLLYEKFTVYNELTKVKYKTEQGKTAFFDANMKQEIFDGVFKVYRKVTKDKLMDFLEKEFDEFRIVDLTGLDKENKVFNASYGTYHDLCKILDKDFLDNSKNEKILEDIVLTLTLFEDREMIRKRLENYSDLLTKEQVKKLERRHYTGWGRLSAELIHGIRNKESRKTILDYLIDDGNSNRNFMQLINDDALSFKEEIAKAQVIGETDNLNQVVSDIAGSPAIKKGILQSLKIVDELVKIMGHQPENIVVEMARENQFTNQGRRNSQQRLKGLTDSIKEFGSQILKEHPVENSQLQNDRLFLYYLQNGRDMYTGEELDIDYLSQYDIDHIIPQAFIKDNSIDNRVLTSSKENRGKSDDVPSKDVVRKMKSYWSKLLSAKLITQRKFDNLTKAERGGLTDDDKAGFIKRQLVETRQITKHVARILDERFHTETDENNKKIRQVKIVTLKSNLVSNFRKEFELYKVREINDYHHAHDAYLNAVIGKALLGVYPQLEPEFVYGDYPHFHGHKENKATAKKFFYSNIMNFFKKDDVRTDKNGEIIWKKDEHISNIKKVLSYPQVNIVKKVEEQTGGFSKESILPKGNSDKLIPRKTKKFYWDTKKYGGFDSPIVAYSILVIADIEKGKSKKLKTVKALVGVTIMEKMTFERDPVAFLERKGYRNVQEENIIKLPKYSLFKLENGRKRLLASARELQKGNEIVLPNHLGTLLYHAKNIHKVDEPKHLDYVDKHKDEFKELLDVVSNFSKKYTLAEGNLEKIKELYAQNNGEDLKELASSFINLLTFTAIGAPATFKFFDKNIDRKRYTSTTEILNATLIHQSITGLYETRIDLNKLGGD

SEQ ID NO: 157 - protein, 1345 aa, Streptococcus mutans
MKKPYSIGLDIGTNSVGWAVVTDDYKVPAKKMKVLGNTDKSHIKKNLLGALLFDSGNTAEDRRLKRTARRRYTRRRNRILYLQEIFSEEMGKVDDSFFHRLEDSFLVTEDKRGERHPIFGNLEEEVKYHENFPTIYHLRQYLADNPEKVDLRLVYLALAHIIKFRGHFLIEGKFDTRNNDVQKLFQEFLAVYDNTFENSSLQEQNVQVEEILTDKISKSAKKDRVLKLFPNEKSNGRFAEFLKLIVGNQADFKKHFELEEKAPLQLSKDTYEEELEVLLAQIGDNYAELFLSAKKLYDSILLSGILTVTDVSTKAPLSASMIQRYNEHQMDLAQLKQFIRQKLSDKYNEVFSDVSKDGYAGYIDGKTNQEAFYKYLKGLLNKIEGSGYFLDKIEREDFLRKQRTFDNGSIPHQIHLQEMRAIIRRQAEFYPFLADNQDRIEKILTFRIPYYVGPLARGKSDFAWLSRKSADKITPWNFDEIVDKESSVEAFINRMTNYDLYLPNQKVLPKHSLLYEKFTVYNELTKVKYKTEQGKTAFFDANMKQEIFDGVFKVYRKVTKDKLMDFLEKEFDEFRIVDLTGLDKENKAFNASYGTYHDLRKILDKDFLDNSKNEKILEDIVLTLTLFEDREMIRKRLENYSDLLTKEQVKKLERRHYTGWGRLSAELIHGIRNKESRKTLLDYLIDDGNSNRNFMQLINDDALSFKEEIAKAQVIGETDNLNQVVSDIAGSPAIKKGILQSLKIVDELVKIMGHQPENIVVEMARENQFTNQGRRNSQQRLKGLTDSIKEFGSQILKEHPVENSQLQNDRLFLYYLQNGRDMYTGEELDIDYLSQYDIDHIIPQAFIKDNSIDNRVLTSSKENRGKSDDVPSKDVVRKMKSYWSKLLSAKLITQRKFDNLTKAERGGLTDDDKAGFIKRQLVETRQITKHVARILDERFNTETDENNKKIRQVKIVTLKSNLVSNFRKEFELYKVREINDYHHAHDAYLNAVIGKALLGVYPQLEPEFVYGDYPHFHGHKENKATAKKFFYSNIMNFFKKDDVRTDKNGEIIWKKDEYISNIKKVLSYPQVNIVKKVEEQTGGFSKESILPKGNSDKLIPRKTKKFYWDTKKYGGFDSPIVAYSILVIADIEKGKSKKLKTVKALVGVTIMEKMTFERDPIAFLERKGYRNVQEENIIKLPKYSLFKLENGRKRLLASARELQKGNEIVLPNHLGTLLYHAKNIHKVDEPKHLDYVDKHKDEFKELLDVVSNFSKKYTLAEGNLEKIKELYAQNNGEDLKELASSFINLLTFTAIGAPAAFKFFDKNIDRKRYTSTTEILNATLIHQSITGLYETRIDLSKLGGD

SEQ ID NO: 158 - protein, 1345 aa, Streptococcus mutans
MKKPYSIGLDIGTNSVGWAVVTDDYKVPAKKMKVLGNTDKSHIKKNLLGALLFDSGNTAEDRRLKRTARRRYTRRRNRILYLQEIFSEEMGKVDDSFFHRLEDSFLVTEDKRGECHPIFGNLEEEVKYHENFPTIYHLRQYLADNPEKTDLRLVYLALAHIIKFRGHFLIEGKFDTRNNDVQRLFQEFLAVYDNTFENSSLQEQNVQVEEILTDKISKSAKKDRVLKLFPNEKSNGRFAEFLKLIVGNQADFKKHFELEEKAPLQFSKDTYEEELEVLLAQIGDNYAELFLSAKKLYDSILLSGILTVTDVSTKAPLSASMIQRYNEHQMDLTQLKQFIRQKLSDKYNEVFSDVSKDGYAGYIDGKTNQEAFYKYLKGLLNKIEGNGYFLDKIEREDFLRKQRTFDNGSIPHQIHLQEMRAIIRRQAEFYPFLADNQDRIEKILTFRIPYYVGPLARGKSDFAWLSRKSADKITPWNFDEIVDKESSAEAFINRMTNYDLYLPNQKVLPKHSLLYEKFTVYNELTKVKYKTEQGKTAFFDANMKQEIFDGVFKVYRKVTKDKLMDFLEKEFDEFRIVDLTGLDKENKAFNASYGTYHDLRKILDKDFLDNSKNEKILEDIVLTLTLFEDREMIRKRLENYSDLLTKEQVKKLERRHYTGWGRLSAELIHGIRNKESRKTLLDYLIDDGNSNRNFMQLINDDALSFKEEIAKAQVIGETDNLNQVVSDIAGSPAIKKGILQSLKIVDELVKIMGHQPENIVVEMARENQFTNQGRRNSQQRLKGLTDSIKEFGSQILKEHPVENSQLQNDRLFLYYLQNGRDMYTGEELDIDYLSQYDIDHIIPQAFIKDNSIDNRVLTSSKENRGKSDDVPSKDVVRKMKPYWSKLLSAKLITQRKFDNLTKAERGGLTDDDKAGFIKRQLVETRQITKHVARILDERFNTETDENNKKIRQVKIVTLKSNLVSNFRKEFELYKVREINDYHHAHDAYLNAVIGKALLGVYPQLEPEFVYGDYPHFHGHEENKATAKKFFYSNIMNFFKKDDVRTDKNGEIIWKKDEHISNIKKVLSYPQVNIVKKVEEQTGGFSKESILPKGNSDKLIPRKTKKFYWDTKKYGGFDSPIVAYSILVIADIEKGKSKKLKTVKALVGVTIMEKMTFERDPVAFLERKGYRNVQEENIIKLPKYSLFKLENGRKRLLASARELQKGNEIVLPNHLGTLLYHAKNIHKVDEPKHLDYVDKHKDEFKELLDVVSNFSKKYTLAEGNLEKIKELYAQNNGEDLKELSSSFINLLTFTAIGAPAAFKFFDKNIDRKRYTSTTEILNATLIHQSITGLYETRIDLSKLGGD

SEQ ID NO: 159 - protein, 1345 aa, Streptococcus mutans
MKKPYSIGLDIGTNSVGWAVVTDDYKVPAKKMKVLGNTDKSHIEKNLLGALLFDSGNTAEDRRLKRTARRRYTRRRNRILYLQEIFSEEMGKVDDSFFHRLEDSFLVTEDKRGERHPIFGNLEEEVKYHENFPTIYHLRQYLADNPEKVDLRLVYLALAHIIKFRGHFLIEGKFDTRNNDVQRLFQEFLAVYDNTFENSSLQEQNVQVEEILTDKISKSAKKDRVLKLFPNEKSNGRFAEFLKLIVGNQADFKKHFELEEKVPLQFSKDTYEEELEVLLAQIGDNYAELFLSAKKLYDSILLSGILTVTDVGTKAPLSASMIQRYNEHQMDLAQLKQFIRQKLSDKYNEVFSDVSKDGYAGYIDGKTNQEAFYKYLKGLLNKIEGSGYFLDKIEREDFLRKQRTFDNGSIPHQIHLQEMRAIIRRQAEFYPFLADNQDRIEKLLTFRIPYYVGPLARGKSDFAWLSRKSADKITPWNFDEIVDKESSAEAFINRMTNYDLYLPNQKVLPKHSLLYEKFTVYNELTKVKYKTEQGKTAFFDANMKQEIFDGVFKVYRKVTKDKLMDFLEKEFDEFRIVDLTGLDKENKVFNASYGTYHDLCKILDKDFLDNSKNEKILEDIVLTLTLFEDREMIRKRLENYSDLLTKEQVKKLERRHYTGWGRLSAELIHGIRNKESRKTILDYLIDDGNSNRNFMQLINDDALSFKEEIAKAQVIGETDNLNQVVSDIAGSPAIKKGILQSLKIVDELVKIMGHQPENIVVEMARENQFTNQGRRNSQQRLKGLTDSIKEFGSQILKEHPVENSQLQNDRLFLYYLQNGRDMYTGEELDIDYLSQYDIDHIIPQAFIKDNSIDNRVLTSSKENRGKSDDVPSKDVVRKMKSYWSKLLSAKLITQRKFDNLTKAERGGLTDDDKAGFIKRQLVETRQITKHVARILDERFNTETDENNKKIRQVKIVTLKSNLVSNFRKEFELYKVREINDYHHAHDAYLNAVIGKALLGVYPQLEPEFVYGDYPHFHGHKENKATAKKFFYSNIMNFFKKDDVRTDKNGEIIWKKDEHISNIKKVLSYPQVNIVKKVEEQTGGFSKESILPKGNSDKLIPRKTKKFYWDTKKYGGFDSPIVAYSILVIADIEKGKSKKLKTVKALVGVTIMEKMTFERDPVAFLERKGYRNVQEENIIKLPKYSLFKLENGRKRLLASARELQKGNEIVLPNHLGTLLYHAKNIHKVDEPKHLDYVDKHKDEFKELLDVVSNFSKKYTLAEGNLEKIKELYAQNNGEDLKELASSFINLLTFTAIGAPATFKFFDKNIDRKRYTSTTEILNATLIHQSITGLYETRIDLNKLGGD

SEQ ID NO: 160 - protein, 1345 aa, Streptococcus mutans
MKKPYSIGLDIGTNSVGWAVVTDDYKVPAKKMKVLGNTDKSHIKKNLLGALLFDSGNTAEDRRLKRTARRRYTRRRNRILYLQEIFSEEMGKVDDSFFHRLEDSFLVTEDKRGERHPIFGNLEEEVKYHENFPTIYHLRQYLADNPEKTDLRLVYLALAHIIKFRGHFLIEGKFDTRNNDVQRLFQEFLAVYDNTFENSSLQEQNVQVEEILTDKISKSAKKDRVLKLFPNEKSNGRFAEFLKLIVGNQADFKKHFELEEKAPLQFSKDIYEEELEVLLAQIGDNYAELFLSAKKLYDSILLSGILTVTDVSTKAPLSASMIQRYNEHQMDLAQLKQFIRQKLSDKYNEVFSDVSKDGYAGYIDGKTNQEAFYKYLKGLLNKIEGSGYFLDKIEREDFLRKQRTFDNGSIPHQIHLQEMRAIIRRQAEFYPFLADNQDRIEKILTFRIPYYVGPLARGKSDFAWLSRKSADKITPWNFDEIVDKESSAEAFINRMTNYDLYLPNQKVLPKHSLLYEKFTVYNELTKVKYKTEQGKTAFFDANMKQEIFDGVFKVYRKVTKDKLMDFLEKEFDEFRIVDLTGLDKENKAFNASYGTYHDLRKILDKDFLDNSKNEKILEDIVLTLTLFEDREMIRKRLKNYSDLLTKEQLKKLERRHYTGWGRLSAELIHGIRNKESRKTILDYLIDDGNSNRNFMQLINDDALSFKEEIAKAQVIGETDNLNQVVSDIAGSLAIKKGILQNLKIVDELVKIMGHQPENIVVEMARENQFTNQGRRNSQQRLKGLTDSIKEFGSQILKEHPVENSQLQNDRLFLYYLQNGRDMYTGEELDIDYLSQYDIDHIIPQAFIKDNSIDNRVLTSSKENRGKSDDVPSKDVVRKMKSYWSKLLSAKLITQRKFDNLTKGERGGLTDDDKAGFIKRQLVETRQITKHVARILDERFNTETDENNKKIRQVKIVTLKSNLVSNFRKEFELYKVREINDYHHAHDAYLNAVIGKALLGVYPQLEPEFVYGDYPHFHGHKENKATAKKFFYSNIMNFFKKDDVRTDKNGEIIWKKDEYISNIKKVLSYPQVNIVKKVEEQTGGFFKESILPKGDSDKLIPRKTKKFYWDTKKYGGFDSPIVAYSILVIADIEKGKSKKLKTVKALVGVTIMEKMTFERDPVAFLERKGYRNVQEENIIKLPKYSLFKLENGRKRLLASARELQKGNEIVLPNHLGTLLYHAKNIHKVDEPKHLDYVDKHKDEFKELLDVVSNFSKKYTLAEGNLEKIKELYAQNNGEDLKELASSFINLLTFTAIGAPATFKFFDKNIDRKRYTSTTEILNATLIHQSITGLYETRIDLSKLGGD

SEQ ID NO: 161 - protein, 1345 aa, Streptococcus mutans
MKKPYSIGLDIGTNSVGWAVVTDDYKVPAKKMKVLGNTDKSHIEKNLLGALLFDSGNTAEDRRLKRTARRRYTRRRNRILYLQEIFSEEMGKVDDSFFHRLEDSFLVTEDKRGERHPIFGNLEEEVKYHENFPTIYHLRQYLADNPEKVDLRLVYLALAHIIKFRGHFLIEGKFDTRNNDVQRLFQEFLAVYDNTFENSSLQEQNVQVEEILTDKISKSAKKDRVLKLFPNEKSNGRFAEFLKLIVGNQADFKKHFELEEKAPLQFSKDTYEEELEVLLAQIGDNYAELFLSAKKLYDSILLSGILTVTDVGTKAPLSASMIQRYNEHQMDLAQLKQFIRQKLSDKYNEVFSDVSKDGYAGYIDGKTNQEAFYKYLKGLLNKIEGSGYFLDKIEREDFLRKQRTFDNGSIPHQIHLQEMRAIIRRQAEFYPFLADNQDRIEKLLTFRIPYYVGPLARGKSDFAWLSRKSADKITPWNFDEIVDKESSAEAFINRMTNYDLYLPNQKVLPKHSLLYEKFTVYNELTKVKYKTEQGKTAFFDANMKQEIFDGVFKVYRKVTKDKLMDFLEKEFDEFRIVDLTGLDKENKVFNASYGTYHDLCKILDKDFLDNSKNEKILEDIVLTLTLFEDREMIRKRLENYSDLLTKEQVKKLERRHYTGWGRLSAELIHGIRNKESRKTILDYLIDDGNSNRNFMQLINDDALSFKEEIAKAQVIGETDNLNQVVSDIAGSPAIKKGILQSLKIVDELVKIMGHQPENIVVEMARENQFTNQGRRNSQQRLKGLTDSIKEFGSQILKEHPVENSQLQNDRLFLYYLQNGRDMYTGEELDIDYLSQYDIDHIIPQAFIKDNSIDNRVLTSSKENRGKSDDVPSKDVVRKMKSYWSKLLSAKLITQRKFDNLTKAERGGLTDDDKAGFIKRQLVETRQITKHVARILDERFNTETDENNKKIRQVKIVTLKSNLVSNFRKEFELYKVREINDYHHAHDAYLNAVIGKALLGVYPQLEPEFVYGDYPHFHGHKENKATAKKFFYSNIMNFFKKDDVRTDKNGEIIWKKDEHISNIKKVLSYPQVNIVKKVEEQTGGFSKESILPKGNSDKLIPRKTKKFYWDTKKYGGFDSPIVAYSILVIADIEKSKSKKLKTVKALVGVTIMEKMTFERDPVAFLERKGYRNVQEENIIKLPKYSLFKLENGRKRLLASARELQKGNEIVLPNHLGTLLYHAKNIHKVDEPKHLDYVDKHKDEFKELLDVVSNFSKKYTLAEGNLEKIKELYAQNNGEDLKELASSFINLLTFTAIGAPATFKFFDKNIDRKRYTSTTEILNATLIHQSITGLYETRIDLNKLGGD

SEQ ID NO: 162 - protein, 1336 aa, Streptococcus mutans
MKKPYSIGLDIGTNSVGWAVVTDDYKVPAKKMKVLGNTDKSHIKKNLLGALLFDSGNTAEDRRLKRTARRRYTRRRNRILYLQEIFAEEMSKVDDSFFHRLDESFLTDDDKNFDSHPIFGNKAEEDAYHQKFPTIYHLRKHLADSTEKADLRLVYLALAHMIKFRGHFLIEGELNAENTDVQKLFADFVGVYDRTFDDSHLSEITVDASSILTEKISKSRRLEKLINNYPKEKKNTLFGNLIALSLGLQPNFKTNFKLSEDAKLQFSKDTYEEDLEELLGKIGDDYADLFTLAKNLYDAILLSGILTADDSSTKAPLSASMIKRYAEHHEDLEKLKEFIKANKPELYHDIFKDETKNGYAGYIENGVKQDEFYKYLKNTLSKITGSDYFLDQIEREDFLRKQRTFDNGSIPHQIHLQEMHAILRRQGDYYPFLKENQDRIEKILTFRIPYYVGPLARKNSRFAWAEYHSDEAVTPWNFDQVIDKESSAQAFIEHMTNNDLYLPNEKVLPKHSPLYEKYTVYNELTKIKYVTEIGEAKFFDANLKQEIFDGLFKHERKVTKKKLRTFLDKNFDEFRIVDIQGLDKETETFNASYATYQDLLKVIKDKVFMDNPENAEILENIVLTLTLFEDREMIKQRLAKYADVFDKKVIDQLARRHYTGWGRLSAKLLNGIRDKQSCKTIMDYLIDDAQSNRNLMQLITDDNLTFKDDIVKAQYVDNSDDLHQVVQSLAGSPAIKKGILQSLKIVDELVKVMGKEPEQIVVEMARENQTTAKGRRNSQQRYKRLKEAIKDLNHKILKEHPTDNQALQNNRLFLYYLQNGRDMYTGESLDINRLSDYDIDHVIPQAFIKDNSIDNRVLTSSKANRGKSDDVPSEDVVNRMRPFWNKLLSSGLISQRKYNNLTKKELTLDDKAGFIKRQLVETRQITKHVARMLDERFNKEFDDNNKRIRRVKIVTLKSNLVSSFRKEFELYKVREINDYHHAHDAYLNAVVVKALLVKYPKLEPEFVYGEYLKYNSYRERKATQKMFFYSNIMNMFKSKVKLADDQIVERPMIEVNDETGEIAWDKTKHITTVKKVLSYPQVNIVKKVEEQTGGLFDPKSPLEKLVPLKKALNPEKYGGYQKPTTAYPILLIVDTKQLIPISVMDKKRFEQNPVKFLKDKGYQQIEKNNFVKLPKYTLVDIGNGIKRLWASSKEVHKGNQLVVSKKSQDLLYHAHHLDNDYSNEYVKNHYQQFDILFNEITSFSKKCKLGKEHIQKIEEAYSKERDFASIEELADGFIKLLGFTQLGATSPFSFLGIKLNQKQYTGKKDYLEATLIHQSITGLYETRIDLSKLGGD

SEQ ID NO: 163 - protein, 1345 aa, Streptococcus mutans
MKKPYSIGLDIGTNSVGWAVVTDDYKVPAKKMKVLGNTDKSHIKKNLLGALLFDSGNTAADRRLKRTARRRYTRRRNRILYLQEIFAEEMSKVDDSFFHRLEDSFLVTEDKRGERHPIFGNLEEEVKYHENFPTIYHLRQYLADNPEKVDLRLVYLALAHIIKFRGHFLIEGKFDTRNNDVQRLFQEFLAVYDNTFENSSLQEQNVQVEEILTDKISKSAKKDRVLKLFPNEKSNGRFAEFLKLIVGNQADFKKHFELEEKAPLQFSKDTYEEELEVLLAQIGDNYAELFLSAKKLYDSILLSGILTVTDVSTKAPLSASMIQRYNEHQMDLVQLKQFIRQKLSDKYNEVFSDVSKDGYAGYIDGKTNQEAFYKYLKGLLNKIEGSGYFLDKIEREDFLRKQRTFDNGSIPHQIHLQEMRAIIRRQAEFYPFLADNQDRIEKILTFRIPYYVGPLARGKSDFAWLSRKSADKITPWNFDEIVDKESSAEAFINRMTNYDLYLPNQKVLPKHSLLYEKFTVYNELTKVKYKTEQGKTAFFDANMKQEIFDGVFKVYRKVTKDKLMDFLEKEFDEFRIVDLTGLDKENKAFNASYGTYHDLRKILDKDFLDNSKNEKILEDIVLTLTLFEDREMIRKRLENYSDLLTKEQVKKLERRHYTGWGRLSAELIHGIRNKESRKTILDYLIDDGNSNRNFMQLINDDALSFKEEIAKAQVIGETDNLNQVVSDIAGSPAIKKGILQSLKIVDELVKIMGHQPENIVVEMARENQFTNQGRRNSQQRLKGLTDSIKEFGSQILKEHPVEHSQLQNDRLFLYYLQNGRDMYTGEELDIDYLSQYDIDHIIPQAFIKDNSIDNRVLTSSKENRGKSDDVPSKNVVRKMKSYWSKLLSAKLITQRKFDNLTKAERGGLTDDDKAGFIKRQLVETRQITKHVARILDERFHTETDENNKKIRQVKIVTLKSNLVSNFRKEFELYKVREINDYHHAHDAYLNAVIGKALLGVYPQLEPEFVYGDYPHFHGHKENKATAKKFFYSNIMNFFKKDDVRTDKNGEIIWKKDEHISNIKKVLSYPQVNIVKKVEEQTGGFSKESILPKGNSDKLIPRKTKKFYWDTKKYGGFDSPIVAYSILVIADIEKGKSKKLKTVKALVGVTIMEKMTFERDPVAFLERKGYRNVQEENIIKLPKYSLFKLENGRKRLLASARELQKGNEIVLPNHLGTLLYHAKNIHKVDEPKHLDYVDKHKDEFKELLDVVSNFSKKYTLAEGNLEKIKELYAQNNGEDLKELASSFINLLTFTAIGAPATFKFFDKNIDRKRYTSTTEILNATLIHQSITGLYETRIDLSKLGGD

SEQ ID NO: 164 - protein, 1345 aa, Streptococcus mutans
MKKPYSIGLDIGTNSVGWAVVTDDYKVPAKKMKVLGNTDKSHIKKNLLGALLFDSGNTAEDRRLKRTTRRRYTRRRNRILYLQEIFSEEMGKVDDSFFHRLEDSFLVTEDKRGERHPIFGNLEEEVKYHENFPTIYHLRQYLADNPEKTDLRLVYLALAHIIKFRGHFLIEGKFDTRNNDVQRLFQEFLAVYDNTFENSSLQEQNVQVEEILTDKISKSAKKDRVLKLFPNEKSNGRFAEFLKLIVGNQADFKKHFELEEKAPLQFSKDTYEEELEVLLAQIGDNYAELFLSAKKLYDSILLSGILTVTDVSTKAPLSASMIQRYNEHQMDLTQLKQFIRQKLSDKYNEVFSDVSKDGYAGYIDGKTNQEAFYKYLKGLLNKIEGSGYFLDKIEREDFLRKQRTFDNGSIPHQIHLQEMRAIIRRQAEFYPFLADNQDRIEKLLTFRIPYYVGPLASGKSDFAWLSRKSADKITPWNFDEIVDKESSAEAFINRMTNYDLYLPNQKVLPKHSLLYEKFTVYNELTKVKYKTEQGKTAFFDANMKQEIFDGVFKVYRKVTKDKLMDFLEKEFDEFRIVDLTGLDKENKVFNASYGTYHDLCKILDKDFLDNSKNEKILEDIVLTLTLFEDREMIRKRLENYSDLLTKEQVKKLERRHYTGWGRLSAELIHGIRNKESRKTILDYLIDDGNSNRNFMQLINDDALSFKEEIAKAQVIGETDNLNQVVSDIAGSPAIKKGILQSLKIVDELVKIMGHQPENIVVEMARENQFTNQGRRNSQQRLKGLTDSIKEFGSQILKEHPVENSQLQNDRLFLYYLQNGRDMYTGEELDIDYLSQYDIDHIIPQAFIKDNSIDNRVLTSSKENRGKSDDVPSKDVVRKMKSYWSKLLSAKLITQRKFDNLTKAERGGLTDDDKAGFIKRQLVETRQITKHVARILDERFNTETDENNKKIRQVKIVTLKSNLVSNFRKEFELYKVREINDYHHAHDAYLNAVIGKALLGVYPQLEPEFVYGDYPHFHGHKENKATAKKFFYSNIMNFFKKDDVRTDKNGEIIWKKDEHISNIKKVLSYPQVNIVKKVEEQTGGFSKESILPKGNSDKLIPRKTKKFYWDTKKYGGFDSPIVAYSILVIADIEKGKSKKLKTVKALVGVTIMEKMTFERDPVAFLERKGYRNVQEENIIKLPKYSLFKLENGRKRLLASARELQKGNEIVLPNHLGTLLYHAKNIHKVDEPKHLDYVDKHKDEFKELLDVVSNFSKKYTLAEGNLEKIKELYAQNNGEDLKELASSFINLLTFTAIGAPATFKFFDKNIDRKRYTSTTEILNATLIHQSITGLYETRIDLSKLGGD

SEQ ID NO: 165 - protein, 1336 aa, Streptococcus mutans
MKKPYSIGLDIGTNSVGWAVVTDDYKVPAKKMKVLGNTDKSHIKKNLLGALLFDSGNTAADRRLKRTARRRYTRRRNRILYLQEIFAEEMNKVDDSFFHRLDESFLTDDDKNFDSHPIFGNKAEEDAYHQKFPTIYHLRKHLADSTEKADLRLVYLALAHMIKFRGHFLIEGELNAENTDVQKLFADFVGVYDRTFDDSHLSEITVDASSILTEKISKSRRLEKLINNYPKEKKNTLFGNLIALSLGLQPNFKTNFKLSEDAKLQFSKDTYEEDLEELLGKIGDDYADLFTLAKNLYDAILLSGILTADDSSTKAPLSASMIKRYAEHHEDLEKLKEFIKANKPELYHDIFKDETKNGYAGYIENGVKQDEFYKYLKNTLSKIAGSDYFLDKIEREDFLRKQRTFDNGSIPHQIHLQEMHAILRRQGDYYPFLKENQDRIEKILTFRIPYYVGPLARKNSRFAWAEYHSDEAVTPWNFDQVIDKESSAQAFIEHMTNNDLYLPNEKVLPKHSPLYEKYTVYNELTKIKYVTEIGEAKFFDANLKQEIFDGLFKHERKVTKKKLRTFLDKNFDEFRIVDIQGLDKETETFNASYATYQDLLKVIKDKVFMDNPENAEILENIVLTLTLFEDREMIKQRLAKYADVFDKKVIDQLARRHYTGWGRLSAKLLNGIRDKQSCKTIMDYLIDDAQSNRNLMQLITDDNLTFKDDIVKAQYVDNSDDLHQVVQSLAGSPAIKKGILQSLKIVDELVKVMGKEPEQIVVEMARENQTTAKGRRNSQQRYKRLKEAIKDLNHKILKEHPTDNQALQNNRLFLYYLQNGRDMYTGESLDINRLSDYDIDHVIPQAFIKDNSIDNRVLTSSKANRGKSDDVPSEDVVNRMRPFWNKLLSSGLISQRKYNNLTKKELTLDDKAGFIKRQLVETRQITKHVARMLDERFNKEFDDNNKRIRRVKIVTLKSNLVSSFRKEFELYKVREINDYHHAHDAYLNAVVVKALLVKYPKLEPEFVYGEYPKYNSYRERKATQKMFFYSNIMNMFKSKVKLADDQIVERPMIEVNDETGEIAWDKTKHITTVKKVLSYPQVNIVKKVEEQTGGLFDPKSPLEKLVPLKKALNPEKYGGYQKPTTAYPILLIVDTKQLIPISVMDKKRFEQNPVKFLKDKGYQQIEKNNFVKLPKYTLVDIGNGIKRLWASSKEVHKGNQLVVSKKSQDLLYHAHHLDNDYSNEYVKNHYQQFDILFNEITSFSKKCKLGKEHIQKIEEAYSKERDSASIEELADGFIKLLGFTQLGATSPFSFLGIKLNQKQYTGKKDYLEATLIHQSITGLYETRIDLSKLGGD

SEQ ID NO: 166 - protein, 1345 aa, Streptococcus mutans
MKKPYSIGLDIGTNSVGWAVVTDDYKVPAKKMKVLGNTDKSHIKKNLLGALLFDSGNTAADRRLKRTARRRYTRRRNRILYLQEIFAEEMSKVDDSFFHRLEDSFLVTEDKRGERHPIFGNLEEEVKYYENFPTIYHLRQYLADNPEKVDLRLVYLALAHIIKFRGHFLIEGKFDTRNNDVQRLFQEFLAVYDNTFENSSLQEQNVQVEEILTDKISKSAKKDRVLKLFPNEKSNGRFAEFLKLIVGNQADFKKHFELEEKAPLQFSKDTYEEDLEELLGKIGDDYADLFTLAKNLYDAILLSGILTADDSSTKAPLSASMIQRYNEHQMDLAQLKQFIRQKLSDKYNEVFSDVSKDGYAGYIDGKTNQEAFYKYLKGLLNKIEGSGYFLDKIEREDFLRKQRTFDNGSIPHQIHLQEMRAIIRRQAEFYPFLADNQDRIEKILTFRIPYYVGPLARGKSDFAWLSRKSADKITPWNFDEIVDKESSAEAFINRMTNYDLYLPNQKVLPKHSLLYEKFTVYNELTKVKYKTEQGKTAFFDANMKQEIFDGVFKVYRKVTKDKLMDFLEKEFDEFRIVDLTGLDKENKVFNASYGTYHDLCKILDKDFLDNSKNEKILEDIVLTLTLFEDREMIRKRLENYSDLLTKEQVKKLERRHYTGWGRLSAELIHGIRNKESRKTILDYLIDDGNSNRNFMQLINDDALSFKEEIAKAQVIGETDNLNQVVSDIAGSPAIKKGILQSLKIVDELVKIMGHQPENIVVEMARENQFTNQGRRNSQQRLKGLTDSIKEFGSQILKEHPVENSQLQNDRLFLYYLQNGRDMYTGEELDIDYLSQYDIDHIIPQAFIKDNSIDNRVLTSSKENRGKSDDVPSKDVVRKMKPYWSKLLSAKLITQRKFDNLTKAERGGLTDDDKAGFIKRQLVETRQITKHVARILDERFNTETDENNKKIRQVKIVTLKSNLVSNFRKEFELYKVREINDYHHAHDAYLNAVIGKALLGVYPQLEPEFVYGDYPHFHGHEENKATAKKFFYSNIMNFFKKDDVRTDKNGEIIWKKDEHISNIKKVLSYPQVNIVKKVEEQTGGFSKESILPKGNSDKLIPRKTKKFYWDTKKYGGFDSPIVAYSILVIADIEKGKSKKLKTVKALVGVTIMEKMTFERDPVAFLERKGYRNVQEENIIKLPKYSLFKLENGRKRLLASARELQKGNEIVLPNHLGTLLYHAKNIHKVDEPKHLDYVDKHKDEFKELLDVVSNFSKKYTLAEGNLEKIKELYAQNNGEDLKELASSFINLLTFTAIGAPATFKFFDKNIDRKRYTSTTEILNATLIHQSITGLYETRIDLSKLGGD

SEQ ID NO: 167 - protein, 1345 aa, Streptococcus mutans
MKKPYSIGLDIGTNSVGWAVVTDDYKVPAKKMKVLGNTDKSHIKKNLLGALLFDSGNTAEDRRLKRTTRRRYTRRRNRILYLQEIFSEEMGKVDDSFFHRLEDSFLVTEDKRGERHPIFGNLEEEVKYHENFPTIYHLRQYLADNPEKTDLRLVYLALAHIIKFRGHFLIEGKFDTRNNDVQRLFQEFLAVYDNTFENSSLQEQNVQVEEILTDKISKSAKKDRVLKLFPNEKSNGRFAEFLKLIVGNQADFKKHFELEEKAPLQFSKDTYEEELEVLLAQIGDNYAELFLSAKKLYDSILLSGILTVTDVSTKAPLSASMIQRYNEHQMDLTQLKQFIRQKLSDKYNEVFSDVSKDGYAGYIDGKTNQEAFYKYLKGLLNKIEGSGYFLDKIEREDFLRKQRTFDNGSIPHQIHLQEMRAIIRRQAEFYPFLADNQDRIEKLLTFRIPYYVGPLASGKSDFAWLSRKSADKITPWNFDEIVDKESSAEAFINRMTNYDLYLPNQKVLPKHSLLYEKFTVYNELTKVKYKTEQGKTAFFDANMKQEIFDGVFKVYRKVTKDKLMDFLEKEFDEFRIVDLTGLDKENKVFNASYGTYHDLCKILDKDFLDNSKNEKILEDIVLTLTLFEDREMIRKRLENYSDLLTKEQVKKLERRHYTGWGRLSAELIHGIRNKESRKTILDYLIDDGNSNRNFMQLINDDALSFKEEIAKAQVIGETDNLNQVVSDIAGSPAIKKGILQSLKIVDELVKIMGHQPENIVVEMARENQFTNQGRRNSQQRLKGLTDSIKEFGSQILKEHPVENSQLQNDRLFLYYLQNGRDMYTGEELDIDYLSQYDIDHIIPQAFIKDNSIDNRVLTSSKENRGKSDDVPSKDVVRKMKSYWSKLLSAKLITQRKFDNLTKAERGGLTDDDKAGFIKRQLVETRQITKHVARILDERFNTETDENNKKIRQVKIVTLKSNLVSNFRKEFELYKVREINDYHHAHDAYLNAVIGKALLGVYPQLEPEFVYGDYPHFHGHKENKATAKKFFYSNIMNFFKKDDVRTDKNGEIIWKKDEHISNIKKVLSYPQVNIVKKVEEQTGGFSKESILPKGNSDKLIPRKTKKFYWDTKKYGGFDSPIVAYSILVIADIEKGKSKKLKTVKALVGVTIMEKMTFERDPVAFLERKGYRNVQEENIIKLPKYSLFKLENGRKRLLASARELQKGNEIVLPNHLGTLLYHAKNIHKVDEPKHLDYVDKHKDEFKELLDVVSNFSKKYTLAEGNLEKIKELYAQNNGEDLKELASSFINLLTFTAIGAPATFKFFDKNIDRKRYTSTTEILKATLIHQSITGLYETRIDLSKLGGD

SEQ ID NO: 168 - protein, 1338 aa, Streptococcus mutans NLML4
MDLIGTNSVGWAVVTDDYKVPAKKMKVLGNTDKSHIKKNLLGALLFDSGNTAADRRLKRTARRRYTRRRNRILYLQEIFAEEMSKVDDSFFHRLEDSFLVTEDKRGERHPIFGNLEEEVKYHENFPTIYHLRQYLADNPEKVDLRLVYLALAHIIKFRGHFLIEGKFDTRNNDVQRLFQEFLAVYDNTFENSSLQEQNVQVEEILTDKISKSAKKDRVLKLFPNEKSNGRFAEFLKLIVGNQADFKKHFELEEKAPLQFSKDTYEEELEVLLAQIGDNYAELFLSAKKLYDSILLSGILTVTDVSTKAPLSASMIQRYNEHQMDLAQLKQFIRQKLSDKYNEVFSDVSKDGYAGYIDGKTNQEAFYKYLKGLLNKIEGSGYFLDKIEREDFLRKQRTFDNGSIPHQIHLQEMRAIIRRQAEFYPFLADNQDRIEKILTFRIPYYVGPLARGKSDFAWLSRKSADKITPWNFDEIVDKESSAEAFINRMTNYDLYLPNQKVLPKHSLLYEKFTVYNELTKVKYKTEQGKTAFFDANMKQEIFDGVFKVYRKVTKDKLMDFLEKEFDEFRIVDLTGLDKENKAFNASYGTYHDLRKILDKDFLDNSKNEKILEDIVLTLTLFEDREMIRKRLENYSDLLTKEQVKKLERRHYTGWGRLSAELIHGIRNKESRKTILDYLIDDGNSNRNFMQLINDDALSFKEEIAKAQVIGETDNLNQVVSDIAGSPAIKKGILQSLKIVDELVKIMGHQPENIVVEMARENQFTNQGRRNSQQRLKGLTDSIKEFGSQILKEHPVEHSQLQNDRLFLYYLQNGRDMYTGEELDIDYLSQYDIDHIIPQAFIKDNSIDNRVLTSSKENRGKSDDVPSKNVVRKMKSYWSKLLSAKLITQRKFDNLTKAERGGLTDDDKAGFIKRQLVETRQITKHVARILDERFHTETDENNKKIRQVKIVTLKSNLVSNFRKEFELYKVREINDYHHAHDAYLNAVIGKALLGVYPQLEPEFVYGDYPHFHGHKENKATAKKFFYSNIMNFFKKDDVRTDKNGEIIWKKDEHISNIKKVLSYPQVNIVKKVEEQTGGFSKESILPKGNSDKLIPRKTKKFYWDTKKYGGFDSPIVAYSILVIADIEKGKSKKLKTVKALVGVTIMEKMTFERDPVAFLERKGYRNVQEENIIKLPKYSLFKLENGRKRLLASARELQKGNEIVLPNHLGTLLYHAKNIHKVDEPKHLDYVDKHKDEFKELLDVVSNFSKKYTLAEGNLEKIKELYAQNNGEDLKELASSFINLLTFTAIGAPATFKFFDKNIDRKRYTSTTEILNATLIHQSITGLYETRIDLSKLGGD

SEQ ID NO: 169 - protein, 1362 aa, Streptococcus oralis
ENKNYSIGLDIGTNSVGWAVITDDYKVPSKKMKVLGNTDKRFIKKNLIGALLFDEGTTAEARRLKRTARRRYTRRKNRLRYLQEIFAEEMSKVDSSFFHRLDDSFLIPEDKKGSKYPIFATLIEEKEYHKQFPTIYHLRKQLADSKEKTDLRLIYLALAHMIKYRGHFLYEDTFDIKNNDIQKIFNEFISIYNNTFEGNSLSGQNVQVEAIFTDKISKSAKRERVLKLFPDEKSTGLFSEFLKLIVGNQADFKKHFDLEEKAPLQFSRDTYDEDLENLLGQIGDDFADLFVAAKKLYDAILLSGILTVTDPSTKAPLSASMIERYENHQKDLATLKQFIKTNLPEKYDEVFSDQSKDGYAGYIDGKTTQESFYKYIKNLLSKFEGADYFLEKIEREDFLRKQRTFDNGSIPHQIHLQEMNAILRRQGEHYPFLKENKEKIEKILTFRIPYYVGPLARGNRDFAWLTRNSDQAIRPWNFEEIVDKASSAESFINKMTNYDLYLPEEKVLPKHSLLYETFAVYNELTKVKFIAEGLRDYQFLDSRQKKDIFYTLFKAEDKRKVTEKDIIQYLHTVDGYDGIELKGIEKQFNASLSTYHDLLKIIKDKEFMDDPNNEEILENIVHTLTIFEDREMIKQRLAQYDSLFDEKVIKALTRRHYTGWGKLSSKLINGIRDKQTGKTILDYLMDDGYNNRNFMQLINDDELSFKEIIKKAQVVGKTDDVKQVVQELPGSPAIKKGILQSIKLVDELVKVMGHEPESIVIEMARENQTTARGKKNSQQRYKRIEDSLKILASKILKEHPTDNIQLQNDRLFLYYLQNGRDMYTGKPLDINQLSSYDIDHIVPQAFIKDDSLDNRVLTSLKDNRGKSDNVPSLEVVEKMKTFWQQLLDSKLISYRKFNNLTKAERGGLDERDKVGFIKRQLVETRQITKHVAQILDARYNTEVNEKDKKNRTVKIITLKSNLVSNFRKEFRLYKIREINDYHHAHDAYLNAVVAKAILKKYPKLEPEFVYGDYQKYDLSKDPKEIEKATEKYFFYSNLLNFFKEEVHYADGTIVKRENIEYSKDTGEIAWNKEKDFATIKKVLSLPQVNIVKKREVQTGGFSKESILPKGNSDKLIPRKTKDILWDTTKYGGFDSPVIAYSILLIADIEKGKAKRLKTVKTLVGITIMEKATFEKSPIAFLENKGYHNVRKENILCLPKYSLFELKNGRRRMLASAKELQKGNEIVLPVHLTTLLYHAKNIHRLDEPEHLEYIQKHRNEFKGLLNLVSEFSQKYVLADANLEKIKNLYADNEQADIEILANSFINLLTFTALGAPAAFKFFGKDVDRKRYTTVSEILNATLIHQSITGLYETRIDLSKLGED

SEQ ID NO: 170 - protein, 1360 aa, Streptococcus oralis
ENKNYSIGLDIGTNSVGWSVITDDYKVPSKKMKVLGNTDKRFIKKNLIGALLFDEGTTAEARRLKRTARRRYTRRKNRLRYLQEIFAEEMSKVDSSFFHRLDDSFLIPEDKRGSKYPIFATLAEEKEYHKQFPTIYHLRKQLADSKEKTDLRLIYLALAHMIKYRGHFLYEDTFDIKNNDIQKIFSEFISIYDNTFEGSSLSGQNAQVEAIFTDKISKSAKRERVLKLFPDEKSTGLFSEFLKLIVGNQADFKKHFDLGEKAPLQFSKDTYDEDLENLLGQIGDDFADLFLVAKKLYDAILLSGILTVTDPSTKAPLSASMIERYENHQKDLAVLKQFIKNNLPEKYDEVFSDQSKDGYAGYIDGKTTQEAFYKYIKNLLSKFEGTDYFLEKIEREDFLRKQRTFDNGSIPHQIHLQEMNAILRRQGEHYPFLKDNKEKIEKILTFRIPYYVGPLARGNRDFAWLTRNSDEAIRPWNFEEIVDKASSAEDFINKMTNYDLYLPEEKVLPKHSLLYETFAVYNELTKVKFIAEGLRDYQFLDSGQKKQIVTQLFKEKRKVTEKDIIQFLHNVDGYDGIELKGIEKQFNASLSTYHDLLKIIKDKEFMDDSKNEEILENIVHTLTIFEDREMIKQRLAQYDSLFDEKVIKALIRRHYTGWGKLSAKLIDGICDKQTGNTILDYLIDDGKNNRNFMQLINDDGLSFKEITQKAQVVGKTDDVKQVVQELPGSPAIKKGILQSIKIVDELVKVMGHTPESIVIEMARENQTTARGKKNSQQRYKRIEDALKNLASNILKEHPTNNIQLQNDRLFLYYLQNGRDMYTGKPLDINQLSSYDIDHIVPQAFIKDDSLDNRVLTSLKDNRGKSDNVPSIEVVQKRKAFWQQLLDSKLISERKFNNLTKAERGGLDERDKVGFIKRQLVETRQITKHVAQILDARFNKEVNEKDKKNRTVKIITLKSNLVSNFRKEFRLYKVREINDYHHAHDAYLNAVVAKAILKKYPKLEPEFVYGDYQKYDLSRNPKEVEKATEKYFFYSNLLNFFKEEVHYADGTIVKRENIEYSKDTGEIAWNKEKDFATIKKVLSYPQVNIVKKREVQTGGFSKESILPKGNSDKLIPRKTKDILWETTKYGGFDSPVIAYSILLIADIEKGKAKKLKTVKTLVGITIMEKAAFEENPITFLENKGYHNVRKENILCLPKYSLFELENGRRRLLASAKELQKGNEIVLPVYLTTLLYHSKNVHKLDEPEHLEYIQKHRNEFKDLLNLVSEFSQKYVLADANLEKIQNLYADNEQADIEILANSFINLLTFTALGAPAAFKFFGKDIDRKRYTTVSEILNATLIHQSITGLYETRIDLSKLGED

SEQ ID NO: 171 - protein, 1358 aa, Streptococcus parasanguinis
KKPYSIGLDIGTNSVGWAVITDDYKVPAKKMKVLGNTNKESIKKNLIGALLFDAGNTAADRRLKRTARRRYTRRRNRILYLQEIFAAEMNKVDESFFHRLDDSFLVPEDKRGSKYPIFGTLEEEKEYHKQFPTIYYLRKILADSKEKVDLRLIYLALAHIIKYRGHFLYEDSFDIKNNDIQKIFNEFTILYDNTFEESSLSKGNAQVEEIFTDKISKSAKRDRVLKLFPDEKSTGLFSEFLKLIVGNQADFKKHFDLEEKAPLQFSKDTYEEDLESLLGQIGDVYADLFVVAKKLYDAILLAGILSVKDPGTKAPLSASMIERYDNHQNDLSALKQFVRRNLPEKYAEVFSDDSKDGYAGYIDGKTTQEGFYKYIKNLISKIEGAEYFLEKIEREDFLRKQRTFDNGSIPHQIHLQEMNAILRHQGEYYPFLKENKDKIEQILTFRIPYYVGPLARGNSDFAWLSRNSDEAIRPWNFEEMVDKSSSAEDFIHRMTNYDLYLPEEKVLPKHSLLYETFTVYNELTKVKYIAEGMKDYQFLDSGQKKQIVNQLFKEKRKVTEKDIIHYLHNVDGYDGIELKGIEKHFNSSLSTYHDLLKIIKDKEFMDDPKNEEIFENIVHTLTIFEDRVMIKQRLNQYDSIFDEKVIKALTRRHYTGWGKLSAKLINGIRDKKTSKTILDYLIDDGYSNRNFMQLINDDGLSFKETIQKAQVVGETNDVKQVVQELPGSPAIKKGILQSIKIVDELVKVMGHAPESVVIEMARENQTTNKGKSKSQQRLKTLSDAISELGNILKEHPTDNIQLQNDRLFLYYLQNGKDMYTGEALDINQLSNYDIDHIIPQAFIKDDSLDNRVLTSSKDNRGKSDNVPSLEIVEKMKGFWQQLLDSKLISERKFNNLTKAERGGLDERDKVGFIKRQLVETRQITKHVAQILDDRFNAEVNEKNQKLRSVKIITLKSNLVSNFRKEFGLYKVREINDYHHAHDAYLNAVVAKAILKKYPKLEPEFVYGDYQKYDLTKDPKEIEKATEKYFFYSNLLNFFKDKVYYADGTIIQRGNVEYSKDTGEIAWNKKRDFAIVRKVLSYPQVNIVKKTEEQTGGFSKESILPKGNSDKLIPRKTKNVQLDTTKYGGFDSPVIAYSILLVADVEKGKSKKLKTVKSLIGITIMEKVKFEANPVAFLEGKGYQNVVEENIIRLPKYSLFELENGRRRMLASAKELQKGNEMVLPSYLIALLYHAKRIQKKDEPEHLEYIKQHHSEFNDLLNFVSEFSQKYVLAESNLEKIKNLYIDNEQTNMEEIANSFINLLTFTAFGAPAVFKFFGKDIERKRYSTVTEILKATLIHQSLTGLYETRIDLSKLGEE

SEQ ID NO: 172 - protein, 1327 aa, Streptococcus parauberis
MKVLGNTDRQTVKKNMIGTLLFDSGETAEARRLKRTARRRYTRRINRIKYLQSIFDDEMSKIDSAFFQRIKDSFLVPDDKNDDRHPIFGNIKDEVDYHKNYPTIYHLRKKLADSDEKADLRLIYLALAHIIKFRGHFLIEGDLDSQNTDVNALFLKLVDTYNLMFEDDIDTQTIDATVILTEKMSKSRRLENLIAKIPNQKKNTLFGNLISLSLGLTPNFKANFELSEDAKLQISKESFEEDLDNLLAQIGDQYADLFIAAKNLSDAILLSDILTVKGVNTKAPLSASMVQRFNEHQDDLKLLKKLVKVQLPEKYKEIFDIKDKNGYAGYINGKTSQEDFYKYIKPILSKLKGAESLISKLEREDFLRKQRTFDNGSIPHQIHLNELKSIIRRQEKYYPFLKDKQVRIEKIFTFRIPYFVGPLANGNSSFAWVKRRSNESITPWNFEEVVEQEASAKVFIERMTNFDTYLPEEKVLPKHSLLYEMFTVYNELTKVKYQAEGMRKPEFLSSEEKIEIVSNLFKTERKVTVKQLKENYFNKIRCLDSITISGVEDKFNASLGTYHDLLNIIKNQKILDDEQNQDSLEDIVLTLTLFEDEKMIAKRLSKYESIFDPSILKKLKKRHYTGWGRLSQKLINGIRDKQTGKTILDFLIDGQANRNFMQLINDPSLDFASIIKEAQEKTIKSEKLEETIANLAGSPAIKKGILQSVKIVDEVVKVMGYEPSNIVIEMARENQSTQRGINNSRERLRKLEEVHKNIGSKILKEHEISNAQLQSDRVYLYLLQDGKDMYTGKDLDFDRLSQYDIDHIIPQSFIKDNSIDNIVLTSQESNRGKSDNVPYIAIVNKMKSYWQHQLKSGAISQRKFDNLTKAERGGLSEYDKAGFIKRQLVETRQITKHVAQILNNRFNNNVDDSSKNKRPVKIITLKSKMVSDFRKEFGFYKIREVNDYHHAHDAYLNAVVGTALLKKYPKLEAEFVYGDYKHYDLSDTSLGKATAKMFFYSNIMNFFKKEVRLADGTVITRPQIETNTETGEIVWDKVKDIKTIRKVLSIPQINVVKKTEVQTGGFSKESILSKRDSDKLIPRKNNWDPKKYGGFGSPIIAYSVLVVAKVTKGKSQKTKSVKELVGITIMEQNEFEKDRITFLEKKGYQDIQESLIIKLPKFSLFELENGRKRLLASELQKGNELSLPNKYIQFLYLASRYTSFSGKEEDREKHRHFVESHLHYFDEIKDIIADFSRRYILADANLEKILTLYNEKNQFSIEEQATNMLNLFTFTGLGAPATLKFFNVDIDRKRYTSSTEILNSTLIRQSITGLYETRIDLSKIGGD

SEQ ID NO: 173 - protein, 1355 aa, Streptococcus phocae
KKSYSIGLDIGTNSVGWAVITDDYKVPAKKMKVLGNTSRQSIKKNMIGALLFDEGGPAASTRVKRTTRRRYTRRKNRLCYLRDIFESEMHTIDKHFFLRLEDSFLHKSDKRYEAHPIFGTLQEEKAYHDNYPTIYHLRKALADNTEKADLRLIYLALAHIIKFRGHFLIEGALSANNTDVQQLVHALVDAYNIMFEEDLDIEAIDVKAILTEKISKTRRLENLISNIPGQKKNGLFGNLIALSLGLTPNFKSHFNLPEDAKLQLAKDTYDEELNNLLTQIGDEYADLFLSAKNLSDAILLSDILTVNGDGTQAPLSASLIKRYEEHRQDLALLKQMFKEQLPDLYRDVFTDENKDGYAGYISGKTSQEAFYKYIKPILETLDGAEDFLTKINREDFLRKQRTFDNGSIPHQIHLGELQAILERQQAYYPFLKDNQEKIEKILTFRIPYYIGPLARGNSRFAWLTRTSDQKITPWNFDEMVDQEASAQAFIERMTNFDEYLPQEKVLPKHSLTYEYFTVYNELTKVKYVTEGMTKPEFLSAGQKEQIVELLFKKYRKVTVKQLKEDFFSKIECFDTVDISGVEDKFNASLGTYHDLLKIIKDKAFLDNSENENIIEDIILTLTLFEDKEMIANRLAVYEDLFDQNVLKQLKRRHYTGWGRLSKQLINGMRDKHTGKTILDFLKDGFINRNFMQLINDDNLSFKEEIKKAQEGGLKDSINDQIRDLAGSPAIKKGILQTINIVDEIVKIMGKAPQHIVVEMARDVQKTDIGVKQSRERMKRVQEVLKKLGSQLLKEHPVENFQLQNERLYLYYLQNGKDMYTGEELSISNLSHYDIDHIIPRSFIKDDSIDNKVLTRSEHNRGKTDNVPSIEVVKRMKPYWQKLLDTKVISQRKFDNLTKAERGGLQESDKANFIQRQLVETRQITKHVAQILDSRFNTERDEKDRPIRRVKVITLKSKFVSDFRQDFGFYKLREINDYHHAHDAYLNAVVGTALLKMYPKLASEFVYGDYQKYDLSGKASGHATAKYFFYSNLMNFFKSEVKLANGNIIKRSPIEVNEETGEIVWDKTKDFGTVRKVLSAPQVNIVKKTEIQTGGFSNETILSKGKSSKLIPRKNKWRDTTKYGGFNTPTVAYSVLVVAKVEKGKAKKLKPVKELVGITIMERTKFEANPIAFLESKGYHDIQEHLMITLPKYSLFELENGRRRLLASELQKGNEMVLPQHLVTFLYRVSKRDKGTQSENMEYISNHKEKFIEIFHYIIRYAEKNVIKPKVIERLNDTFNQKFNDSDLTELSISFLNLFKFTSFGAPEKFTFLNSEIKQDDVRYRSTKECLNSTLIHQSVTGLYETRIDLSQFGGD

SEQ ID NO: 174 - protein, 1361 aa, Streptococcus pseudopneumoniae
SNKPYSIGLDIGTNSVGWAVITDDYKVPSKKMKVLGNTDKHFIKKNLIGALLFDEGTTAEDRRLKRTARRRYTRRKNRLRYLQEIFSEEISKVDNSFFHRLDDSFLVPEDKRGSKYPIFATLTEEKEYYKQFPTIYHLRKQLADSKEKADLRLIYLTLAHMIKYRGHFLYEESFDIKNNDIQKIFNEFISIYDNTFEGSSLSGQNAQVEAIFTDKISKSTKRERVLKLFPDQKSTGLFSEFLKLIVGNQADFKKHFDLEEKAPLQFSKDTYDEDLENLLGQIGDDFADLFLVAKKLYDAILLSGILTVTDPSTKAPLSASMIERYENHQKDLAALKQFIKNNLPEKYDEVFSDQSKEGYAGYIDSKTTQEAFYKYIKNLLSKIDGADYLLDKIEREDFLRKQRTFDNGSIPHQIHLQEMNAILRRQGEHYPFLKENREKIEKILTFRIPYYVGPLARGNRDFAWLTRNSDQAIRPWNFEEIVDKASSAEAFINKMTNYDLYLPEEKVLPKHSLLYETFAVYNELTKVKFIAEGLRDYQFLDSGQKKKIINQLFKEKRKVTEKDLIHYLHNVDGYDGIELKGIEKQFNASLSTYHDLLKIIKDKRFMDEPKNQEILENIVHTLTIFEDREMIKQRLAQYASIFDEKVIKTLTRRHYTGWGKLSAKLINCIRDRKTGKTILDYLIDDGYNNRNFMQLINDDGLSFKEIIQESQVVGKPDDVKQIVQELPGSSAIKKGILQSIKLVDELVKVMGHDPESIVIEMARENQTTARGKKNSQQRYKRIEDSLKILASNILKEHPTDNIQLQNDRLFLYYLQNGKDMYTGNPLDINHLSSYDIDHIIPQAFIKDDSLDNRVLTSSKDNRGKSDNVPSLEVVQKRKAFWQQLLESKLISERKFNNLTKAERGGLNERDKVGFIKRQLVETRQITKHVAQILDSRFNTKVNEKNQKIRTVKIITLKSNLVSNFRKEFRLYKVREINDYHHAHDAYLNAVVAKAILKKYPKLEPEFVYGDYQKYDLSRDPKEIEKATEKYFFYSNLLNFFKEEVHYADGTIVKRENIEYSKDTGEIAWNKEIDFATIRKILSLSQVNIVKKTEEQTGGLFDNNIVSKKKVVDASKLIPIKSGLSPEKYGGYARPTIAYSVLVIADIEKGKAKKLKRIKEMVGITIQDKKKFEANPTAYLEEYGYKNINPNLIIKLPKYSLFKFNDGQRRLLASSIELQKGNELILPYHFTTLLYHAQRINKISEPIHKQYVETHQSEFEELLTTIISLSKKYIQKPIVESLLQQAFEQADKDIYQLSESFISLLKLTSFGAPGAFRFLGVEISQSNVRYQSVSSCFNATLIHQSITGLYETRIDLSKLGED

SEQ ID NO: 175 - protein, 1361 aa, Streptococcus pseudopneumoniae
SNKPYSIGLDIGTNSVGWVIITDDYKVPSKKMKVLGNTDKHFIKKNLIGALLFDEGTTAEDRRLKRTARRRYTRRKNRLRYLQEIFAEEMNKVDSSFFHRLDDSFLVPEDKRGSKYPIFATLAEEKEYHKNFPTIYHLRKQLADSKEKADLRLIYLALAHMIKYRGHFLYEEAFDIKNNDIQKIFNEFINIYDNTFEGSSLSGQNEQVEAIFSDKISKSAKRERVLKLFPDEKSTGLFSEFLKLIVGNQADFKKHFDLEEKAPLQFSKDTYDEDLENLLGQIGDGFADLFLVAKKLYDAILLSGILTVTDPSTKAPLSASMIERYQNHQNDLASLKQFIKNNLPEKYDEVFSDQSKDGYAGYVDGKTTQEAFYKYIKNLLSKFEGADYFLEKIEREDFLRKQRTFDNGSIPHQIHLQEMNAILRRQGEHYPFLKENKEKIEKILTFRIPYYVGPLARGNRDFAWLTRNSDQAIRPWNFEEIVDKASSAEDFINKMTNYDLYLPEEKVLPKHSLLYETFAVYNELTKVKFIAEGLRDYQFLDSGQKKQIVNQLFKEKRKVTEKDIIQYLHNVDGYDGIELKGIEKQFNASLSTYHDLLKIIKDKEFMDDSKNEEILENIVHTLTIFEDREMIKQRLAQYDSIFDEKVIKALTRRHYTGWGKLSAKLINGIRDKQTGKTILDYLIDDGYSNRNFMQLINDDGLSFKEIIQKAQVFGKTNDVKQVVQELPGSPAIKKGILQSIKIVEELVKVMGHEPESIVIEMARENQTTTRGKKNSQQRYKRIENSLKILASKILKEHPTDNNQLQNDRLFLYYLQNGKDMYTGEALDINQLSSCDIDHIIPQAFIKDDSLDNRVLTSSKENRGKSDNVPCLEVVDKMKVFWQQLLDFKLISYRKFNNLTKAERGGLDERDKVGFIRRQLVETRQITKHVAQILDSRFNTEVTEKDKKNRNVKIITLKSNLVSNFRKEFGLYKVREINDYHHAHDAYLNAVVAKAILKKYPKLEPEFVYGDYQKYDLSKDPKDIEKATEKYFFYSNLLNFFKEEVHYADGTIVKRENIEYSKDTGEIAWNKEKDFATIKKILSLPQVNIVKKTEEQTGGLFDNNIVSKKKVVDASKLIPIKSGLSPEKYGGYARPTIAYSVLVIADIEKGKTKKLKRIKEMIGITVQDKKIFESNPIAYLEECGYKNINPNLIIKLPKYSLFEFNGGQRRLLASSIELQKGNELILPYHFTALLYHTQRINKISEPIHKQYVEAHQNEFKELLTTIISLSKKYIQKPNVESLLQQAFEQADKDIYQLSESFISLLKLTSFGAPGAFKFLGVEISQSSVRYKPNSQFLDATLIHQSITGLYETRIDLSKLGED

SEQ ID NO: 176 - protein, 1363 aa, Streptococcus pseudopneumoniae
SNKPYSIGLDIGTNSVGWAVITDDYKVPSKKMTVLGNTDKHFIKKNLIGALLFDEGTTAEDRRLKRTARRRYTRRKNRLRYLQEIFSGEMSKVDSSFFHRLDDSFLVPEDKRGSKYPIFATLVEEKEYHKQFPTIYHLRKQLADSKEKADLRLIYLVLAHMIKYRGHFLYEEAFDIKNNDIQKIFNEFISIYDNTFEGSSLSGQNAQVETIFTDKISKSAKRERVLKLFPDEKSTGLFSEFLKLIVGNQADFKKHFDLGEKAPLQFSKDTYDEDLENLLGQIGDDFADLFLVAKKLYDAILLSGILTVTDPSTKAPLSASMIERYENHQKDLTTLKQFIKNNLPEKYDEVFSDQSKDGYAGYIDGKTTQEAFYKYIKNLLSKFEGTDYFLEKIEREDFLRKQRTFDNGSIPHQIHLQEMNAILRRQGEHYPFLKENKEKIEKILTFRIPYYVGPLARGNRDFAWLTRNSDQAIRPWNFEEIVDKASSAEDFINKMTNYDLYLPEEKVLPKHSLLYETFAVYNELTKVKFIAEGLRDYQFLDSGQKKQIVNQLFKEKRKVTEKDIIHYLHTVDGYDGIELKGIEKQFNASLSTYHDLLKIIKDKEFMDDSKNEAILENIVHTLTIFEDREMIKQRLAQYDSLFDKKVIKALTRRHYTGWGKLSAKLINGICDKQTGNTILDYLIDDGEINRNFMQLINDDGLSFKKIIQKSQVVGETDDVKQVVRELPGSPAIKKGILQSIKIVDELVKVMDHAPESIVIEMARENQTTARGKKNSQQRYKRIEDSLKILASNILKENPTDNNQLQNDRLFLYYLQNGKDMYTGEALDINQLSSYDIDHIIPQAFIKDDSLDNRVLTSSKDNRGKSDNVPSLEVVQKRKAFWQQLLDSKLISERKFNNLTKAERERDGLNELDKVGFIKRQLVETRQITKHVAQILDARFNKEVTEKDKKNRNVKIITLKSNLVSNFRKEFRLYKVREINDYHHAHDAYLNAVVAKAILKKYPKLEPEFVYGDYQKNDLSKDPKDIEKATEKYFFYSNLLNFFKEEVHYADGTIVKRENIEYSKDTGEIAWNKEKDFATIKKVLSYPQVNIVKKTEEQTGGLFDNNIVSKEKVVDASKLIPIKSGLSPEKYGGYARPTIAYSVLVIADIEKGKTKKLKRIKEMVGITIQDKKKFEANPIAYLEECGYKNINPNLIIKLPKYSLFEFNGGQRRLLASSIELQKGNELILPYHFTALLYHAQRINKFSEPIHKQYVEAHQNEFKELLTIIISLSKKYIQKPNVESLLHQAFEQADNDIYQLSESFISLLKLTSFGAPGAFKFLGAEISQSSVRYKPNSQFLDTTLIHQSITGLYETRIDLSKLGED

SEQ ID NO: 177 - protein, 1360 aa, Streptococcus pseudoporcinus
YSYSIGLDIGTNSVGWAVINEDYKVPAKKMTVFGNTDRKTIKKNLLGTVLFDSGETAQARRLKRTNRRRYTRRRYRLCQLQNIFATEMVKVDDTFFQRLSESFFYYQDKAFDKHPIFGNSKEERAYHKTYPTIYHLRKDLADRDQKADLRLIYLALSHIIKFRGHFLIEGKLNSENTDVQKLFIALVTVYNLLFEEEIAGETCDAKALLTAKTSKSKRLESLISEFPGQKKNGLFGNLLALALGLRPNFKSNFGLSEDAKLQITKDTYEEELDNLLAEIGDHYADLFLAAKNLSDAILLSDILTLSDENTRAPLSASMIKRYEEHQEDLALLKKLVKEQMPEKYWEIFSNAKKNGYAGYIEGKVSQEDFYRYIKPILSRLKGGDEFLAKIDRDDFLRKQRTFDNGSIPHQIHLKELHAILRRQEKYYPFLAEQKEKIEQLLCFRIPYYVGPLAKGGNSSFAWLKRRSDEPITPWNFKDVVDEEASAQAFIEGMTNYDTYLPEEKVLPKHSPLYEMFTVYNELTKVKYIAENMTKPLYLSAEQKEAIIDHLFKQTRKVTVKDLKEKYFSQIEGLENVDVTGVEGAFNASLGTYNDLLKIIKDKAFLDDEANAEILEEIVLILTLFQDEKLIEKRLAKYANLFEKSVLKKLRKRHYRGWGRLSRQLIDGMKDKASGKTILDFLKDDFANRNFIQLINDSSLDFEKLIDDAQKKAIKRESLTEAVANLAGSPAIKKGILQSLKVVDEIVKVMGHNPDNIVIEMSRENQTTAQGLKNARQRLKKIKEVHKKTGSRILEDNSERITNLTLQDNRLYLYLLQDGKDMYTGQDLDINNLSQYDIDHIIPQSFIKDNSIDNLVLTTQKANRGKSDNVPSIEVVRDMKDRVWRRQLANGAISRQKFDHLTKAERGGLADSDKARFLRRQLVETRQITKHVAQLLDSRFNSKSNQNKKLARNVKIITLKSKIVSDFRKDFGLYKLREVNNYHHAHDAYLNAVVGTALLKKYPKLEAEFVYGDYKHFDLSDPSLGKATAKVFFYSNIMNFFKEELSLADGTLMKRPVIETNTETGEVVWDKVKDFKTIRKVLSYPQVNIVKKTEIQSGAFSKESVLSKGNSDKLIERKKGWDPKKYGGFDSPNTAYSIFVVAKVAKRKAQKLKTVKEIVGITIMEQAEYEKDNIAFLEKKGYQDIQEKLLIKLPKYSLFELENGRRRLLASEFQKGNELALSGKYMKFLYLASRYDKLSSKIESEQQKKLFVEQHLHYFDEILDIVVKHATCYIKAENNLKKIISLYKKKEAYSINEQALNMLNLFIFTSLGAPSTFVFFDETIDRKRYTTSSDVLNGILIQQSITGLYETRIDLSRFGGD

SEQ ID NO: 178 - protein, 1316 aa, Streptococcus pseudoporcinus SPIN 20026
MLGTVLFDSGETAQARRLKRTNRRRYTRRRYRLCQLQNIFATEMVKVDDTFFQRLSESFFYYQDKAFDKHPIFGNSKEERAYHKTYPTIYHLRKDLADRDQKADLRLIYLALSHIIKFRGHFLIEGKLNSENTDVQKLFIALVTVYNLLFEEEIAGETCDAKALLTAKTSKSKRLESLISEFPGQKKNGLFGNLLALALGLRPNFKSNFGLSEDAKLQITKDTYEEELDNLLAEIGDHYADLFLAAKNLSDAILLSDILTLSDENTRAPLSASMIKRYEEHQEDLALLKKLVKEQMPEKYWEIFSNAKKNGYAGYIEGKVSQEDFYRYIKPILSRLKGGDEFLAKIDRDDFLRKQRTFDNGSIPHQIHLKELHAILRRQEKYYPFLAEQKEKIEQLLCFRIPYYVGPLAKGGNSSFAWLKRRSDEPITPWNFKDVVDEEASAQAFIEGMTNYDTYLPEEKVLPKHSPLYEMFTVYNELTKVKYIAENMTKPLYLSAEQKEAIIDHLFKQTRKVTVKDLKEKYFSQIEGLENVDVTGVEGAFNASLGTYNDLLKIIKDKAFLDDEANAEILEEIVLILTLFQDEKLIEKRLAKYANLFEKSVLKKLRKRHYRGWGRLSRQLIDGMKDKASGKTILDFLKDDFANRNFIQLINDSSLDFEKLIDDAQKKAIKRESLTEAVANLAGSPAIKKGILQSLKVVDEIVKVMGHNPDNIVIEMSRENQTTAQGLKNARQRLKKIKEVHKKTGSRILEDNSERITNLTLQDNRLYLYLLQDGKDMYTGQDLDINNLSQYDIDHIIPQSFIKDNSIDNLVLTTQKANRGKSDNVPSIEVVRDMKDRVWRRQLANGAISRQKFDHLTKAERGGLADSDKARFLRRQLVETRQITKHVAQLLDSRFNSKSNQNKKLARNVKIITLKSKIVSDFRKDFGLYKLREVNNYHHAHDAYLNAVVGTALLKKYPKLEAEFVYGDYKHFDLSDPSLGKATAKVFFYSNIMNFFKEELSLADGTLMKRPVIETNTETGEVVWDKVKDFKTIRKVLSYPQVNIVKKTEIQSGAFSKESVLSKGNSDKLIERKKGWDPKKYGGFDSPNTAYSIFVVAKVAKRKAQKLKTVKEIVGITIMEQAEYEKDNIAFLEKKGYQDIQEKLLIKLPKYSLFELENGRRRLLASEFQKGNELALSGKYMKFLYLASRYDKLSSKIESEQQKKLFVEQHLHYFDEILDIVVKHATCYIKAENNLKKIISLYKKKEAYSINEQALNMLNLFIFTSLGAPSTFVFFDETIDRKRYTTSSDVLNGILIQQSITGLYETRIDLSRFGGD

SEQ ID NO: 179 - protein, 1359 aa, Streptococcus sanguinis
KKPYSIGLDIGTNSVGWAVVTDDYKVPAKKMRVFGDTDRSHIKKNLLGTLLFDDGNTAESRRLKRTARRRYTRRRNRILYLQEIFTESMNEIDESFFHRLDDSFLVPEDKRGSKYPIFATLQEEKEYHKQFPTIYHLRKQLADSKEKSDVRLIYLALAHMIKYRGHFLYEETFDIKNNDIQKIFNEFINIYDNTFEGSSLSGQNAQVEAIFTDKISKSAKRERVLKLFPDEKSTGLFSEFLKLIVGNQADFKKHFDLEEKAPLQFSKDTYDEELENLLGQIGDDFADLFLIAKKLYDAILLSGILTVTDPSTKAPLSASMIERYENHQKDLAALKQFIKNNLPEKYVEVFSDQSKDGYAGYIDGKTTQEAFYKYIKNLLSKFEGADYFLDKIEREDFLRKQRTFDNGSIPHQIHLQEMNAILRRQGEHYPFLKENREKIEKILTFRIPYYVGPLARDNRDFSWLTRNSDEPIRPWNFEEVVDKARSAEDFIHRMTNYDLYLPEEKVLPKHSLLYETFAVYNELTKVKFIAEGLRDYQFLDSGQKKQIVNQLFKEKRKVTEKDIIHYLHNVDGYDGIELKGIEKQFNANLSTYHDLLKITKDKEFMDDPKNEEILENIVHTLTIFEDREMIKQRLAQYDTLFDEKVIKALTRRHYTGWGKLSAKLINGIRDKQSGKTILDYLIDDDKINRNFMQLINDDGLSFKEIIQKAQVVGKTDDVKQVVQELPGSPAIKKGILQSIKIVDELVKVMGYALESIVIEMARENQTTARGKKNSQQRYKRIEDALKNLAPNILKENPTDNIQLKNDRLFLYYLQNGKDMYTGKPLDINQLSSYDIDHIIPQAFIKDDSIDNRVLTSSKDNRGKSDNVPSLEVVQKRKAFWQQLLDSKLISERKFNNLTKAERGGLDERDKVGFIRRQLVETQQITKNVAQILDARFNTEVKEKNQKIRTVKIITLKSNLVSNFRKEFGLYKVREINNYHHAHDAYLNAVVAKAILKKYPKLEPEFVYGDYQKYDLFKPSKEIEKATEKYFFYSNLLNFFKEEVLYADGTIRKRENIEYSKDTGEIAWDKEKDFATIKKVLSYPQVNIVKKREVQTGGFSKESILPKGNSDKLIPRKTKDILWDTTKYGGFDSPVIAYSILLIADIEKGKAKKLKTVKTLVGITIMEKAAFEENPITFLENKGYHNVRKENILCLPKYSLFELENGRRRLLASAKELQKGNEIVLPVCLTTLLYHSKNLHKLDEPEHLEYIQKHRNEFKDLLNLVSEFSQKYILAEANLEKIKDLYADNEQADIEILANSFINLLTFTALGAPAAFKFFGKDVDRKRYTTVSEILNATLIHQSITGLYETRIDLSKLGEE

SEQ ID NO: 180 - protein, 1362 aa, Streptococcus sanguinis
KKPYSIGLDIGTNSVGWAVITDDYKVPSKKMKVLGNTDKHFIKKNLIGALLFDEGTTAEDRRLKRTSRRRYTRRKNRLRYLQEIFSEEISKLDSSFFHRLDDSFLVPEDKRGSKYPIFATLEEEKEYHKKFPTIYHLRKHLADSKEKTDLRLIYLALAHMIKYRGHFLYEESFDIKNNDIQKIFNEFISIYDNTFEGSSLSGQNAQVEAIFTDKISKSTKRERVLKLFSDEKSTGLFSEFLKLIVGNQADFKKHFDLEEKAPLQFSKDTYDEDLENLLGQIGDGFADLFLVAKKLYDAILLSGILTVTDPSTKAPLSASMIERYENHQEDLAALKQFIKNNLSEKYAEVFSDQSKDGYAGFIDGKTTQEAFYKYIKNLLSKLEGADYFLNKIEREDFLRKQRTFDNGSIPHQIHLQEMNAILRRQGEHYLFLKENREKIEKILAFRIPYYVGPLARGNRDFAWLTRNSDQAIRPWNFEEVVDKASSAEDFINKMTNYDLYLPEEKVLPKHSLLYETFAVYNELTKVKFIAEGLRDYQFLDSGQKKQIVNQLFKDKRKVTEKDIIHYLHNVDGYDGIELKGIEKQFNASLSTYHDLLKIIKDKEFMDNPKNGEILENIIHTLTIFEDREMIKQRLAQYDTLFDEKVIKALTRRHYTGWGKLSAKLINGIRDKQTGKTILEYLIDDGDCNRNFMQLINDDGLSFKEIIQKAQVVGKTDDVKQVVQEIPGSPAIKKGILQSIKIVDELVKVMGHNPESIVIEMARENQTTAKGKKNSQQRYKRIEDALKNLAPNILKENPTDNIQLQNDRLFLYYLQNGKDMYTGKAIDINQLSNYDIDHIIPQAFIKDDSLDNRVLTSSKDNRGKSDNVPSIEVVQKRKAFWQQLLDSKLISERKFNNLTKAKRGGLDERDKVGFIKRQLVETRQITKHVAQLLDTRFNTEVNEENQKIRTVKIITLKSNLVSNFRKEFGLYKVREINDYHHAHDAYLNAVVAKAILKKYPKLEPEFVYGDYQKYDLSKASNTIDKATEKYFFYSNLLNFFKEKVRYADGTIKKRENIEYSNDTGEIAWNKEKDFATIKKVLSLPQVNIVKKTEEQTGGLFDNNIVSKKKVVDASKLIPIKSSLSPEKYGGYARPTIAYSVLVIADIEKGKGKAKKLKRIKEIVGITIQDKKKFESNPVTYLEECGYKNINSNLIIKLPKYSLFEFNDGQRRLLASSIELQKGNELILPYHLTALLYHAQRINKISEPIHKQYVEAHQNEFKELLTTIISLSKKYIQKPNVELLLQQAFDQADKDIYQLSESFISLLKLTSFGAPGAFKFLGVEISQSSVRYKPNSQFLDTTLIHQSITGLYETRIDLSKLGED

SEQ ID NO: 181 - protein, 1360 aa, Streptococcus sp. F0441
ENKNYSIGLDIGTNSVGWSVITDDYKVPSKKMKVLGNTDKHFIKKNLIGALLFDEGTTAEARRLKRTARRRYTRRKNRLRYLQEIFSEEIGKVDSSFFHRLDDSFLIPEDKRGSKYPIFATLAEEKKYHKQFPTIYHLRKQLADSKEKTDLRLIYLALAHMIKYRGHFLYEEAFDIKNNDIQKIFNEFISIYNNTFEGNSLSGQNVQVEAIFTDKISKSAKRERVLKLFPDEKSTGLFSEFLKLIVGNQADFKKHFDLEEKAPLQFSRDTYDEDLENLLGQIGDDFADLFLVAKKLYDAILLSGILTVTNPSTKAPLSASMIERYENHQKDLASLKQFIKNNLPEKYDEVFSDQSEDGYAGYIDGKTTQETFYKYIKNLLSKFEGADYFLDKIEREDFLRKQRTFDNGSIPHQIHLQEMNAILRRQGEHYPFLKENKEKIEKILTFRIPYYVGPLARGNRDFAWLTRNSDQAIRPWNFEEIVDKASSAEDFINKMTNYDLYLPEEKVLPKHSLLYETFAVYNELTKVKFIAEGLRDYQFLDSGQKKQIVTQLFKEKRKVTEKDIIQFLHNVDGYDGIELKGIEKQFNASLSTYHDLLKIIKDKAFMDDAKNEAILENIVHTLTIFEDREMIKQRLAQYDSLFDEKVIKALTRRHYTGWGKLSAKLINGISDKQTGNTILDYLIDDGEINRNFMQLINDDGLSFKEIIQKAQVVGKTNDVKQVVQELPGSPAIKKGILQSIKIVDELVKVMGHAPESIVIEMARENQTTARGKKNSQQRYKRIEDSLKILASKILKEHPTDNIQLQNDRLFLYYLQNGKDMYTGEALDINQLSSCDIDHIIPQAFIKDDSLDNRVLTSSKDNRGKSDNVPSLEVVDKMKVFWQQLLDSKLISYRKFNNLTKAERGGLNELDKVGFIKRQLVETRQITKHVAQILDARFNKEVTEKDKKNRTVKIITLKSNLVSNFRKEFELYKVREINDYHHAHDAYLNAVVAKAILKKYPKLEPEFVYGDYQKYDLSKDPKEIEKATEKYFFYSNLLNFFKEEVHYADGTIVKRENIEYSKDTGEIAWNKEKDFATIKKVLSLPQVNIVKKREVQTGGFSKESILPKGNSDKLIPRKTKDILWDTTKYGGFDSPVIAYSILLIADIEKGKAKKLKTVKTLVGITIMEKDAFEKNPIAFLENKGYHNVCKENILCLPKYSLFELENGRRRLLASAKELQKCNEIVLPVYLTTLLYHSKNVHKLDEPGHLEYIQKHRNEFKDLLNLVSEFSQKYVLADANLEKIKNLYADNEQADIEILANSFINLLTFTALGAPAAFKFFGKDVDRKRYTTVSEILNATLIHQSITGLYETRIDLSKLGED

SEQ ID NO: 182 - protein, 1360 aa, Streptococcus sp. FF10
MKKPYSIGLDIGTNSVGWSVVTDDYKVPAKKMKVLGNTDKEYIKKNLIGALLFDSGETAEATRMKRTARRRYTRRRNRILYLQDIFSPELNQVDESFLHRLDDSFLVAEDKRGERHVIFGNIADEVKYHKEFPTIYHLRKHLADSSEKADLRLVYLALAHIIKYRGHFLIDEPIDIRNMNSQNLFKEFLLAFDGIQVDCYLASKHTDISGIITAKISKSRKVEAVLEQFPDQKKNSFFGNMVSLVFGLMPNFKSNFELDEDAKLQFSRDSYDEDLENLLGIIGDEYADVFVAAKKVYDSILLSGILTTNNHSTKAPLSASMIDRYDEHNSDKKLLRDFIRTNIGKEVFKEVFYDTSKNGYAGYIDGKTNQEDFYKYLKNLLQKVDGGDYFIEKIEREDFLRKQRTFDNGSIPHQVHLDEMKAILRRQGEFYPFLKENAEKIQQILTFKIPYYVGPLARGNSRFAWASYNSNEKMTPWNFDNVIDKTSSAQAFIERMTNNDLYLPDQKVLPKHSLLYQKFAVYNELTKIKYVTETGEARLFDVFLKKEIFDGLFKKERKVTKKKILNFLDKNFDEFRITDIQGLDNETGNFNASYGTYHDLLKIIGDKEFMDSSDNVDVLEDIVLSLTLFEDREMIKQRLLKYEDIFSKKVIANLTRRHYTGWGRLSAKLINGIKDKHSRKTILDYLIDDGHSNRNFMQLINDDNLSFKDEIANSQVIGDGDDLHQVVQELAGSPAIKKGILQSLKIVDELVKVMGYNPEQIVVEMARENQTTARGRNNSQQRLGSLTKAIQDFGSDILKRYPVENNQLQNDQLYLYYLQNGKDMYTGDTLDIHNLSQYDIDHIIPQSFIKDNSLDNRVLTNSKSNRGKSDNVPSNEVVKRMKGFWLKQLDAKLISQRKFDNLTKAERGGLSAEDKAGFIKRQLVETRQITKHVARILDERFNRDFDKNDKRIRNVKIVTLKSNLVSNFRKEFGFYKVREINNFHHAHDAYLNAVVAKALLIRYPKLEPEFVYGEYPKYNSYRERKATEKMFFYSNIMNMFKTTIKLADGRVVEKPVIEANEETGEIAWDKTKHFANVKKVLSYPQVSIVKKVEEQTGGFSKESILPKGGSDKLIARKTKNNYLSTQKYGGFDSPTVAYSIMFVADIEKGKSKRLKTVKEMIGITIMERSRFESNSVTFLEEKGYRNIRENTIIKFPKYSLFELENGRRRLLASAIELQKGNEMFLPQQFVNLLYHAQHANKEDSVIYLEKHRHELSELFHHIIGVSEKTILKPKVEMTLNEAFEKHFEFDEVSELAQSFISLLKFTAFGAPGGFKFLDADIKQSNLRYQTVTEVLSSTLIHQSVTGLYETRIDLSKLGGE

SEQ ID NO: 183 - protein, 1364 aa, Streptococcus sp. M334
SNKSYSIGLDIGTNSVGWAVITDDYKVPSKKMKVLGNTDKHFIKKNLIGALLFDEGTTAEDRRLKRTARRRYTRRKNRLRYLQEIFSQEISKVDSSFFHRLDDFFLVPEDKRGSKYPIFATLVEEKEYHKKFPTIYHLRKHLADSKEKTDLRLIYLALAHMIKYRGHFLYEESFDIKNNDIQKIFSEFISIYDNTFEGKSLSGQNAQVEAIFTDKISKSTKRERVLKLFPDEKSTGLFSEFLKLIVGNQADFKKHFDLEEKAPLQFSKDTYDEDLENLLGQIGDDFADLFLVAKKLYDAILLSGILTVKDLSTKAPLSASMIERYENHQKDLAALKQFIQNNLQEKYDEVFSDQSKDGYAGYIDGKTTQEAFYKYIKNLLSKFEGADYFLDKIEREDFLKKQRTFDNGSIPHQIHLQEMNAIIRRQGEHYPFLQENKEKIEKILTFRIPYYVGPLARGNGDFAWLTRNSDQAIRPWNFEEIVDQASSAEDFINKMTNYDLYLPEEKVLPKHSLLYETFAVYNELTKVKFIAEGLTRYQFLDKKQKKDIFDTFFKAENKRKVTEKDIIHYLHNVDGYDGIELKGIEKQFNASLSTYHDLLKIIKDKAFMDDSKNEEILENIIHTLTIFEDREMIKQRLAQYDSLFDEKVIKALTRRHYTGWGKLSAKLINGIRDKKSGKTILDYLIDDGEINRNFMQLIHDDGLSFKEIIQKAQVFGKTNDVKQVVQELPGSPAIKKGILQSIKIVDELVKVMGHAPESIVIEMARENQTTARGKKNSQQRYKRIEDSLKNLASNILKENPTDNIQLQNDRLFLYYLQNGRDMYTGKPLEINQLSNYDIDHIIPQAFIKDDSLDNRVLTSSKDNRGKSDNVPSLEVVEKMKAFWQQLLDSKLISERKFNNLTKAERERGGLNELDKVGFIKRQLVETRQITKHVAQFLDARFNKEVTEKDKKNRNVKIITLKSNLVSNFRKEFGLYKVREINDYHHAHDAYLNAVLAKAILKKYPKLEPEFVYGDYQKYDLSREPKEVEKATQKYFFYSNLLNFFKEEVHYADGTIVKRENIEYSKDTGEIAWNKEKDFATVKKVLSLPQVNIVKKTEVQTGGFSKESILPKGNSDKLIPRKTKEILWDTTKYGGFDSPVIAYSILLIADIEKGKAKKLKTVKTLVGITIMEKATFEKNPITFLENKGYHNVRKENILCLPKYSLFELESGRRRMLASAKELQKGNEIVLPVYLTTLLYHSKNVHKLDEPEHLEYIQKHRYEFKDLLNLVSEFSQKYVLADANLEKIKNLYADNEQADIEILANSFINLLTFTALGAPAAFKFLGKDVDRKRYTTVSEILNATLIHQSITGLYETRIDLSKLGED

SEQ ID NO: 184 - protein, 1360 aa, Streptococcus sp. taxon 056
NNNNYSIGLDIGTNSVGWAVITDDYKVPSKKMRVLGNTDKRFIKKNLIGALLFDEGTTAEDRRLKRTARRRYTRRKNRLRYLQEIFAEEMSKVDSSFFHRLDDSFLVPEDKSGSKYPIFATLAEEKEYHKKFPTIYHLRKHLADSKEKADLRLIYLALAHITKYRGHFLYEEAFDIKNNDIQKIFNEFINIYDNTFEGSSLSGQNAQVEAIFTGKISKSVKREHVLKLFPDEKSTGLFSEFLKLIVGNQADFKKHFDLEEKASLQFSKDTYDEDLENLLGQIGDDFADLFLVAKKLYDAILLSGILTVTDPSTKAPLSASMIERYENHQEDLAALKQFIKNNLPEKYAEVFSDQSKDGYAGYIDGKTTQEAFYKYIKNLLSKFEGADYFLDKIEREDFLRKQRTFDNGSIPHQIHLQEMNAILRRQGEHYPLLKENKEKIEKILTFRIPYYVGPLARGNRDFAWLTRNSDQAIRPWNFEEIVDKASSAESFINKMTNYDLYLPEEKVLPKHSLLYETFAVYNELTKVKFIAEGLRDYQFFDSGQKKQIVNQLFKEKRKVTEKDIIHYLHNVDGYDGIELKGIEKQFNASLSTYHDLLKIIKDKEFMDNHKNQEILENIVHTLTIFEDREMIKQRLAQYDSIFDEKVIKALTRRHYTGWGKLSAKLINGICDKKTGKTILDYLIDDGYNNRNFMQLINDDGLSFKEIIQKAQVVGKTDDLTQVVRELSGSPAIKKGILQSIKIVDELVKIMGYAPESIVIEMARENQTTAKGKKNSQQRYKRIEDALKNLAPTISKENPTDNIQLQNDRLFLYYLQNGKDMYTGEALDINQLSSYDIDHIIPQAFIKDDSLDNRVLTSSKDNRGKSDNVPSLEVVKKRKAFWQQLLDSKLISERKFNNLTKAERGGLDERDKVGFIKRQLVETRQITKHVARILDARFNTEVSEKNQKIRSVKIITLKSNLVSNFRKEFKLYKVREINDYHHAHDAYLNAVVAKAILKKYPKLEPEFVYGDYQKYDLSKDPKEVEKATEKYFFYSNLLNFFKEEVHYADGTIVKRENIEYSKDTGEIAWNKEKDFVTIKKVLSYPQVNIVKKREVQTGGFSKESILPKGNSDKLIPRKTKDILWDTTKYGGFDSPVIAYSILLIADIEKGKAKKLKTVKTLVGITIMEKAAFEKNPITFLENKGYHNVRKENILCLPKYSLFELENGRRRLLASAKELQKGNEIVLPVYLTTLLYHSKNVHKLDEPEHLEYIQKHRYEFKDLLNLVSEFSQKYVLAEANLEKIKSLYVDNEQADIEILANSFINLLTFTALGAPAAFKFFGKDVDRKRYTTVSEILNATLIHQSITGLYETRIDLSKLGED

SEQ ID NO: 185 - protein, 1359 aa, Streptococcus suis
MKKKYAIGIDIGTNSVGWSVVTDDYKVPSKKMKVFGNTEKRYIKKNLLGTLLFDEGNTAENRRLKRTARRRYTRRRNRILYLQEIFAEEINKIDDSFFQRLDDSFLIVEDKQGSKHPIFGTLQEEKKYHKQFPTIYHLRKQLADSSQKADIRLIYLALAHIIKYRGHFLFEGDLKSENKDVQHLFNDFVEMFDKTVEGSYLSENLPNVADVLVEKVSKSRRLENILHYFPNEKKNGLFGNFLALALGLQPNFKTNFELAEDAKIQFSKETYEEDLEELLGKIGDDYADLFIATKSLYDGILLAGILSTTDSTTKAPLSSSMVNRYEEHKKDLALLKNFIHQNLSDSYKEVFNDKLKDGYAGYIEGKTTQENFYRFIKKAIEKIEGSDYFIDKIDREDFLRKQRTFDNGSIPHQIHLQEMHAIIRRQAEFYPFLVENQDKIEKILTFRIPYYVGPLARGKSEFAWLNRKSDEKIRPWNFDEMVDKETSAENFITRMTNYDQYLPDQKVLPKHSLLYEKFAVYNELTKVKFIAEGMRDYQFLDSGQKKDIVKTLFKTKRKVTAKDIKAYLENSNGYAGVELKGLEEQFNASLPTYHDLLKILRDKAFIDAEENQEILEDIVLTLTLFEDREMIRKRLEKYKDILTEEQRKKLERRHYTGWGRLSAKLINGILDKVTRKTILGYLIDDGTSNRNFMQLINDDTLSFVDEIRLAQGSGEAEDYRAEVQNLAGSPAIKKGILQSLKIVDELIEVMGYDPEHIVVEMARENQFTNQGRRNSQQRYKKIENAIKNLNSKILKEYPTNNQALQNDRLFLYYLQNGKDMYTDEELDIDQLSQYDIDHIIPQAFIKDDSLDNKVLTKSAKNRGKSDDVPSLEIVHKKKNFWKQLLDSQLISQRKFDNLTKAERGGLTNEDKARFIQRQLVETRQITKHVARILDTRFNTKLDEAGNRIRDPKVNIITLKSNLVSQFRKDYQLYKVREINNYHHAHDAYLNAVVATALLKKYPQLAPEFVYGDYPKYNSYKSRKATEKVLFYSNIMNFFRRVLVYSKTGEVRIRPVIEVNKETGEIVWDKKSDFRTVRKVLSYPQVNVVKKVEMQTGGFSKESILQHGDSDKLIPRKTEKFYLDTKKYGGFDSPTIAYSVLLIADIEKGKAKKLKRVKELIGITIMERMAFEKNPIEFLEHKGYKNILEKNIIKLPKYSLFELENGRRRLLASAKELQKGNEMILPPHLVTLLYHSSNIHKITEPIHLNYVNKNKHEFKELLRHISDFSTRYILAQDRLSKIEELYDKNDGDDISDLTSSFVNLLTFTAIGAPAAFKFLGSVIDRKRYTSIAEILEATLIHQSVTGLYETRIDLSKLGGD

SEQ ID NO: 186 - protein, 1361 aa, Streptococcus suis
MKKKYAIGIDIGTNSVGWSVVTDDYKVPSKKMKVFGNTEKRYIKKNLLGTLLFDEGNTAENRRLKRTARRRYTRRRNRILYLQEIFAEEINKIDDSFFQRLDDSFLIVEDKQGSKHPIFGTLQEEKEYHKQFPTIYHLRKQLADSSQKADIRLIYLALAHIIKYRGHFLFEGDLKSENKDVQHLFNDFVEMFDKTVEGSYLSENLPNVADVLVEKVSKSRRLENILHYFPNEKKNGLFGNFLTLALGLQPNFKTNFELAEDAKIQFSKETYEEDLEELLGKIGDDYADLFIATKSLYDGILLAGILSTTDSTTKAPLSSSMVNRYEEHQKDLALLKNFIHQNLSDSYKEVFNDKLKDGYAGYIEGKTTQENFYRFIKKAIEKIEGSNYFIDKIDREDFLRKQRTFDNGSIPHQIHLQEMHAIIRRQAEFYPFLVENQDKIEKILTFRIPYYVGPLARGKSEFAWLNRKSDEKIRPWNFDEMVDKETSAENFITRMTNYDQYLPDQKVLPKHSLLYEKFAVYNELTKVRYVTEQGKSFFFDANMKQEIFDGVFKVYRKVTKEKLMDFLGKEFDEFRIVDLLGLDKDNKSFNASLGTYHDLKKIVSKDLLDNPENEDILENVVLTLTLFEDREMIRKRLEKYKDVLTEEQRKKLERRHYTGWGRLSAKLINGIRDKVTRKTILDYLIDDGTSNRNFMQLINDDTLSFVDEIRLAQGSGEAEDYRAEVQNLAGSPAIKKGILQSLKIVDELIEVMGYDPEHIVVEMARENQFTNQGRRNSQQRYKKIENAIKNLNSKILKEYPTNNQALQNDRLFLYYLQNGKDMYTDEELDIDQLSQYDIDHIIPQAFIKDDSLDNKVLTKSAKNRGKSDDVPSLEIVHKKKNFWKQLLDSQLISQRKFDNLTKAERGGLTNEDKARFIQRQLVETRQITKHVARILDTRFNTKLDEAGNRIRDPKVNIITLKSNLVSQFRKDYQLYKVREINNYHHAHDAYLNAVVATALLKKYPQLAPEFVYGDYPKYNSYKSRKATEKVLFYSNIMNFFRRVLVYSKTGEVRIRPVIEVNKETGEIVWDKKSDFRTVRKVLSYPQVNVVKKVEMQTGGFSKESILQHGDSDKLIPRKTEKFYLDTKKYGGFDSPTIAYSVLLIADIEKGKAKKLKRVKELIGITIMERMAFEKNPIEFLEHKGYKNILEKNIIKLPKYSLFELENGRRRLLASAKELQKGNEMILPPHLVTLLYHSSNIHKITEPIHLNYVNKNKHEFKELLRHISDFSTRYILAQDRLSKIEELYDKNDGDDISDLTSSFVNLLTFTAIGAPAAFKFLGSVIDRKRYTSIAEILEATLIHQSVTGLYETRIDLSKLGGD

SEQ ID NO: 187 - protein, 1361 aa, Streptococcus suis
MKKKYAIGIDIGTNSVGWSVVTDDYKVPSKKMKVFGNTEKRYIKKNLLGTLLFDEGNTAENRRLKRTARRRYTRRRNRILYLQEIFAEEINKIDDSFFQRLDDSFLIVEDKQGSKHPIFGTLQEEKEYHKQFPTIYHLRKQLADSSQKADIRLIYLALAHIIKYRGHFLFEGDLKSENKDVQHLFNDFVEMFDKTVEGSYLSENLPNVADVLVEKVSKSRRLENILHYFPNEKKNGLFGNFLALALGLQPNFKTNFELAEDAKIQFSKETYEEDLEELLGKIGDDYADLFIATKSLYDGILLAGILSTTDSTTKAPLSSSMVNRYEEHQKDLALLKNFIHQNLSDSYKEVFNDKLKDGYAGYIEGKTTQENFYRFIKKAIEKIEGSNYFIDKIDREDFLRKQRTFDNGSIPHQIHLQEMHAIIRRQAEFYPFLVENQDKIEKILTFRIPYYVGPLARGKSEFAWLNRKSDEKIRPWNFDEMVDKETSAENFITRMTNYDQYLPDQKVLPKHSLLYEKFAVYNELTKVRYVTEQGKSFFFDANMKQEIFDGVFKVYRKVTKEKLMDFLGKEFDEFRIVDLLGLDKDNKSFNASLGTYHDLKKIVSKDLLDNPENEDILENVVLTLTLFEDREMIRKRLEKYKDVLTEEQRKKLERRHYTGWGRLSAKLINGIRDKVTRKTILDYLIDDGTSNRNFMQLINDDTLSFVDEIRLAQGSGEAEDYRAEVQNLAGSPAIKKGILQSLKIVDELIEVMGYDPEHIVVEMARENQFTNQGRRNSQQRYKKIENAIKNLNSKILKEYPTNNQALQNDRLFLYYLQNGKDMYTDEELDIDQLSQYDIDHIIPQAFIKDDSLDNKVLTKSAKNRGKSDDVPSLEIVHKKKNFWKQLLDSQLISQRKFDNLTKAERGGLTNEDKARFIQRQLVETRQITKHVARILDTRFNTKLDEAGNRIRDPKVNIITLKSNLVSQFRKDYQLYKVREINNYHHAHDAYLNAVVATALLKKYPQLAPEFVYGDYPKYNSYKSRKATEKVLFYSNIMNFFRRVLVYSKTGEVRIRPVIEVNKETGEIVWDKKSDFRTVRKVLSYPQVNVVKKVEMQTGGFSKESILQHGDSDKLIPRKTEKFYLDTKKYGGFDSPTIAYSVLLIADIEKGKAKKLKRVKELIGITIMERMAFEKNPIEFLEHKGYKNILEKNIIKLPKYSLFELENGRRRLLASAKELQKGNEMILPPHLVTLLYHSSNIHKITEPIHLNYVNKNKHEFKELLRHISDFSTRYILAQDRLSKIEELYDKNDGDDISDLTSSFVNLLTFTAIGAPAAFKFLGSVIDRKRYTSIAEILEATLIHQSVTGLYETRIDLSKLGGD

SEQ ID NO: 188 - protein, 1359 aa, Streptococcus suis
MKKKYAIGIDIGTNSVGWSVVTDDYKVPSKKMKVFGNTEKRYIKKNLLGTLLFDEGNTAENRRLKRTARRRYTRRRNRILYLQEIFAEEINKIDDSFFQRLDDSFLIVEDKQGSKHPIFGTLQEEKKYHKQFPTIYHLRKQLADSSQKADIRLIYLALAHIIKYRGHFLFEGDLKSENKDVQHLFNDFVEMFDKTVEGSYLSENLPNVADVLVEKVSKSRRLENILHYFPNEKKNGLFGNFLALALGLQPNFKTNFELAEDAKIQFSKETYEEDLEELLGKIGDDYADLFIATKSLYDGILLAGILSTTDSTTKAPLSSSMVNRYEEHKKDLALLKNFIHQNLSDSYKEVFNDKLKDGYAGYIEGKTTQENFYRFIKKAIEKIEGSDYFIDKIDREDFLRKQRTFDNGSIPHQIHLQEMHAIIRRQAEFYPFLVENQDKIEKILTFRIPYYVGPLARGKSEFAWLNRKSDEKIRPWNFDEMVDKETSAENFITRMTNYDQYLPDQKVLPKHSLLYEKFAVYNELTKVKFIAEGMRDYQFLDSGQKKDIVKTLFKTKRKVTAKDIKAYLENSNGYAGVELKGLEEQFNASLPTYHDLLKILRDKAFIDAEENQEILEDIVLTLTLFEDREMIRKRLEKYKDILTEEQRKKLERRHYTGWGRLSAKLINGILDKVTRKTILGYLIDDGTSNRNFMQLINDDTLSFVDEIRLAQGSGEAEDYRAEVQNLAGSPAIKKGILQSLKIVDELIEVMGYDPEHIVVEMARENQFTNQGRRNSQQRYKKIENAIKNLNSKILKEYPTNNQALQNDRLFLYYLQNGKDMYTDEELDIDQLSQYDIDHIIPQAFIKDDSLDNKVLTKSAKNRGKSDDVPSLEIVHKKKNFWKQLLDSQLISQRKFDNLTKAERGGLTNEDKARFIQRQLVETRQITKHVARILDTRFNTKLDEAGNRIRDPKVNIITLKSNLVSQFRKDYQLYKVREINNYHHAHDAYLNAVVATALLKKYPQLAPEFVYGDYPKYNSYKSRKATEKVLFYSNIMNFFRRVLVYSKTGEVRIRPVIEVNKETGEIVWDKKSDFKTVRKVLSYPQVNVVKKVEMQTGGFSKESILQHGDSDKLIPRKTEKFYLDTKKYGGFDSPTIAYSVLLIADIEKGKAKKLKRVKELIGITIMERMAFEKNPIEFLEHKGYKNILEKNIIKLPKYSLFELENGRRRLLASAKELQKGNEMILPPHLVTLLYHSSNIHKITEPIHLNYVNKNKHEFKELLRHISDFSTRYILAQDRLSKIEELYDKNDGDDISDLTSSFVNLLTFTAIGAPAAFKFLGSVIDRKRYTSIAEILEATLIHQSVTGLYETRIDLSKLGGD

SEQ ID NO: 189 - protein, 1351 aa, Streptococcus suis
MDQKYSIGLDIGTNSVGWAVVTDDYKVPAKKMKVLGNTDKQSIKKNLLGALLFDSGETAEATRLKRTARRRYTRRRNRLRYLQEIFAEEMNKVDENFFQRLDDSFLVDEDKRGERHPIFGNIAAEVKYHDDFPTIYHLRKHLADISQKADLRLVYLALAHMIKFRGHFLIEGQLKAENTNVQALFKDFVEVYDKTVEESHLSEMTVDALSILTEKVSKSRRLENLIAHYPAEKKNTLFGNLIALSLGLQPNFKTNFQLSEDAKLQFSKDTYEEDLEGLLGEIGDEYADLFASAKNLYDAILLSGILTVDDNSTKAPLSASMVKRYEEHQKDLKKLKDFIKVNAPDQYNAIFKDKNKKGYAGYIENGVKQDEFYKYLKGILLQINGSGDFLDKIDREDFLRKQRTFDNGSIPHQIHLQEMHAILRRQEEHYPFLKENQDKIEKILTFRIPYYVGPLARKGSRFAWAEYKADEKITPWNFDDILDKEKSAEKFITRMTLNDLYLPEEKVLPKHSLLYETFTVYNELTKVKYVNEQGEAKFFDANMKQEIFDHVFKENRKVTKDKLLNYLGKEFDEFRIVDLTGLDKENKVFNSSLGTYHDLRKILDKSFLDNKENEQIIEDIIQTLTLFEDREMIRQRLQKYSDIFTKAQLKKLERCHYTGWGRLSYKLINGIRNKENKKTILDYLIDDGYANRNFMQLINDDALSFKEEIAKAQVIGETDDLNQVVSDIAGSPAIKKGILQSLKIVDELVKVMGYNPANIVIEMARENQTTDKGRRNSQQRLKLLQDSLKPVNIKNVENQQLQNDRLFLYYIQNGKDMYTGETLDINNLSQYDIDHIIPQAFIKDDSFDNRVLTSSSENRGKSDNVPSIEVVRARKADWMRLRKAGLISQRKFDNLTKAERGGLTENDKAGFIKRQLVETRQITKHVAQVLDARFNAKHDENKKVIRDVKIITLKSNLVSQFRKDFKFYKVREINDYHHAHDAYLNAVIGTALLKKYPKLASEFVYGEFKKYDVSDKEIGKATAKYFFYSNLMNFFKKEVKFADGTVVERPDIETSEDGEIAWNKQTDFKIVRKVLSYPQVNIVKKTEVQTHGLDRPSPKPKPDSSENLVGVKRNLDPKKYGGYAGISNSYAVLVKAIIEKGVKKKETMVLEFQGISILDRITFEKDKRAFLLGKGYKDIKKIIELPKYSLFELKDGSRRMLASRGEIHKGNELFVPQKFTTLLYHAKRINNPINKDHIEYVKKHRDDFKELLNYVLEFNEKYVGATKNGERLKEAVADFDSKSNEEICTSFLGLFELTSLGSASDFEFLGVKIPRYRDYTPSSLLKDSTLIHQSITGLYETRIDLSKLGED

SEQ ID NO: 190 - protein, 1256 aa, Brochothrix thermosphacta
MWGVSLFEAGKTAAERRGYRSTRRRLNHRKFRLRLLEDMFEKEILSKDPSFFIRLKEAFLSPKDEQKQFLFNDKDYTDADYYEQYKTIYHLRYDLISQHRQFDIREVYLAIHHLIKYRGHFIYEDQTFTTDGNQLQHHIKAIITMINSTLNRIIPETIDINVFEKILLDRMMNRSSKVKFLIELTGKQDKPLLKELFNLIVGLKAKPASIFEQENLATIVETMNMSTEQVQLDLLTLADVLADEEYDLLLTAQKIYSAIILDESMDGYEYFAEAKKESYRKHQEELVLVKKMLKSNAITNDERAKFEYFYTDYIGYEESKSKEERLFKHIELLLAKENVLTTVEHALLEKNITFASLLPLQRSSRNAVIPYQVHEKELVAILENQATYYPFLLEQKDNIHKLLTFRIPYYVGPLADQKDSEFAWMVRKQAGKITPFNFEEMVDIDASSEAFIKRMTNKCTYLIHEDVIPKHSFSYAKFEVLNELNKIRLDGKPIDIPLKKRIFEGLFLEKTKVTQTSLKKWLAEHEHMTVSVVQGTQKETEFATSLQAFHRFVKIFDRETVSNPANEEMFEKIIYWSTVFEDKKIMRRKLSEYPQLTEQQQVQLAQVRFRGWGRLSQRLINRIKTPEDHKLSINEILQTNENFMQIIRNKDYLFKKIIEEQFENETALLNKQRIDELAASPANKKGIWQAIKIVKELEKVLQQPAENIFIEFARSDEESKRSTPRDKFIEKAYAETDTEHLKELKQRSKQLSSQRLFLYFIQNGKCMYSGEHLDIERLDSYEVDHILPQSYIKDNSIENLALVKKVENQRKKDSLLLNSSIINQNYSRWEQLKNAGLIGEKKFRNLTRTKITDRDKEGFIARQLVETRQITKHVTQLLQQEYKDTTKVFAIKATLVSGLRRKFEFIKNRNVNDYHHAQDAFLVAFLGTNITSNYPKIEMEYLFKGYQHYLNEVGKAAKPKFTFIVENLSKQQNSTTGEVKWNPEVDIAKLKRILNFKQCNIVRKVEEQSGALFKETIYPVEESSSKTIPLKKHLDTAIYGGYTAVNYASYALIQFKKGRKLKREIIGIPLAVQTRIDNSETSLQAYIAEQIKSEVEILNGRILKYQLISNNGNRLYIAGSERHNARQLIVSDEAAKVIWLISTKQADEAMFLKYYRLEHLEAVFEELIRKQAADYQIFEKLIKKIEVNFYSCTYNEKVKVIELLKITQANATNGDLKLLKMSNREGRLGSVSVALDFKIINQSVTGLYQSIEDYNN

SEQ ID NO: 191 - protein, 1290 aa, Catenibacterium mitsuokai
IVDYCIGLDLGTGSVGWAVVDMNHRLMKRNGKHLWGSRLFSNAETAANRRASRSIRRRYNKRRERIRLLRAILQDMVLEKDPTFFIRLEHTSFLDEEDKAKYLGDNYNLFIDEDFNDYTYYHKYPTIYHLRKALCESTEKADPRLIYLALHHIVKYRGNFLYEGQKFNMDASNIEDKLSDIFTQFTSFNNIPYEDDKKNLEILEILKKPLSKKAKVDEVMTLIAPEKDYKSAFKELVTGIAGNKMNVTKMILCEPIKQGDSEIKLKFSDSNYDDQFSEVEKDLGEYVEFVDALHNVYSWVELQTIMGATHTDNASISEAMVSRYNKHHDDLKLLKDCIKNNVPNKYFDMFRNDSEKSKGYYNYINRKAPVDEFYKYVKKCIEKVDTPEAKQILNDIELENFLLKQNSRTNGSVPYQMQLDEMIKIIDNQAEYYPILKEKREQLLSILTFRIPYYFGPLETSEHAWIKRLEGKENQRILPWNYQDIVDVDATAEGFIKRMRSYCTYFPDEEVLPKNSLIVSKYEVYNELNKIRVDDKLLEVDVKNDIYNELFMKNKTVTEKKLKNWLVNNQCCSKDAEIKGFQKENQFSTSLTPWIDFTNIFGKIDQSNFDLIENIIYDLTVFEDKKIMKRRLKKKYALPDDKVKQILKLKYKDWSRLSKKLLDGIVADSVTVLDVLESRLNLMEIINDKDLGYAQMIEEATSCPEDGKFTYEEVERLAGSPALKRGIWQSLQIVEEITKVMKCRPKYIYIEFERSEEKERTESKIKKLENVYKDEQTSVLEELKGFDNTKKISSDSLFLYFTQLGKCMYSGKKLDIDSLDKYQIDHIVPQSLVKDDSFDNRVLVVPSENQRKLDDLVVPFDIRDKMYRFWKLLFDHELISPKKFYSLIKTEYTERDEERFINRQLVETRQITKNVTQIIEDHYSTTKVAAIRANLSHEFRVKNHIYKNRDINDYHHAHDAYIVALIGGFMRDRYPNMHDSKAVYSEYMKMFRNKNDQKGFVINSMNYPYEVDGKLIWNPDLINEIKKCFYYKDCYCTTKLDQKSGQLFNTVLSNDAHADKGAVVPVNKNRSDVHKYGGFSGLQYTIVAIEGQKKKGKKTELVKKISGVPLHLKAASINEKINYIEEKEGLSDVRIIKDNIPVNQMIEMDGGEYLLTSEYVNARQLVLNEKQCALIADIYNAIYKQDYDNLDDILMIQLYIELTNKMKVLYPAYRGIAEKFESYVVISKEEKANIIQMLIVMHRGPQNGNIVYDDFKISDRIGRLKTKNHNLNIVFISQSPTGIYTKKYKL

SEQ ID NO: 192 - protein, 1359 aa, Artificial Sequence; identical to SEQ ID NO: 10
  Synthetic polypeptide

SEQ ID NO: 193 - protein, 1313 aa, Clostridiales bacterium S5-A11
MKNYTIGLDIGTNSVGWAVIKDDLTLVRKKIKISGNTDKKEVKKNLWGSFLFEQGDTAQDTRVKRIARRRYERRRFRIRELQKIFDKSMGEVDSNFFHRLDESFLVEEDKEYSKYPIFSNEKEDKNYYDKYPTIYHLRKDLADSNQKADLRLIYLALAHMIKYRGHFLIEGDLKMDGISISESFQEFIDSYNEVCALEDENNDELLTQIENIFKQDISRSKKLDQAIALFQGKRQSLFGIFLTLIVGNKANFQKIFNLEDDIKLDLKEEDYDENLEELLSNIDEGYRDVFLQAKNVYNAIELSKILKTDGKETKAPLSAQMVELYNQHREDLKKYKDYIKAYLPEKYGETFKDATKNGYAGYIDGKTSQEDFYKFVKAQLKGEENGEYFLEAIENENFLRKQRSFYNGVIPYQIHLQELTAVLDQQEKHYSFLKENRDKIISLLTFRIPYYVGPLAKGESRFAWLERSNSEEKIKPWNFDKIVDIDKSAELFIENLTSRDTYLPDEPVLPKRSLIYQKFTIFNELTKISYIDERGILQNFSSREKIAIFNDLFKNKSKVTKNQLVKYIENKEQIIAPEIKGIEDSFNSNYSTYIDLDMKLLEKDEDEILEEIIKILTIFEDRKMRKRQLMKFKDKLSEKAINQLSKKHYTGWGQLSEKLINGIRDEQSNKTILDYLIDNGCPKNMNRNFMQLINDDTLSFKEKIRKAQDINQVNDIKEIVKDLPGSPAIKKGIYQSIRIVDEIIRKMKDRPKNIVIEMARENQTTQEGKNKSKARLKKIQEGLENLDSHVEKQALDEEMLKSPKYYLYCLQNGKDIYTGKDLDIGQLQTYDIDHIIPRSFITDNSFDNLVLTSSTVNRGKLDNVPSPDIVRQQKGFWKQLLRAGLMSQRKFNNLTKGKLTDRDRQQFINRQLVETRQITKHVANLLSHHLNEKKEVGEINIVLLKSALTSQFRKKFDFYKVREVNDYHHAHDAYLNGVIALKLLELYPYMAKDLIYGKYSYHRKGDKATQAKYKMSNIIERFSQDLLANPDGEIAWEKDKDLNTIRKVLSSKQINIIKKAEEGKGRLFKETINSRPSKKTEKRIPIKNNLDPNIYGGYIEEKMAYYIAINYLENGKTKKAIVGISIKDKKDFEGQTTEYLGKIGFNKASIINSFKNYTLFELENGSRRMIVGKGELQKGNQMYLPQNLLEFVYHLKHYNEDETSHKFIVEHKAYFDELLNYIVEFANKYLELENSIEKIKDLYHGKGPDVEEKELVESFINLLAITKCGPAADITFLGEKISRKRYRSTNCLWGSEVIFQSPTGLYETRLRLE

SEQ ID NO: 194 - protein, 1359 aa, Artificial Sequence; identical to SEQ ID NO: 10
  Synthetic polypeptide

SEQ ID NO: 195 - protein, 1327 aa, Dolosigranulum pigrum
MQKNYTIGLDIGTNSVGWAVMKDDYTLIRKRMKVLGNTDIKKIKKNFWGVRLFDEGETAKETRLKRGTRRRYQRRRNRLIYLQDIFQQPMLAIDENFFHRLDDSFFVPDDKSYDRHPIFGSLEEEVAYHNTYPTIYHLRKHLADNPEKADLRLVYTALAHIVKYRGHFLIEGELNTENTSISETFEQFLDTYSDIFKEQLVGDISKVEEILSSKQSRSRKHEQIMALFPNENKLGNFGRFMMLIVGNTSNFKPVFDLDDEYKLKLSDETYEEDLDTLLGMTDDVFLDVFMAAKNVYDAVEMSAIISTDTGNSKAVLSNQMINFYDEHKVDLAQLKQFFKTHLPDKYYECFSDPSKNGYAGYIDGKTNQEDFYKYIEKVMKTIKSDKKDYFLDKIDREVFLRKQRSFYNSVIPHQIHLQEMQAILDRQSQYYPFLAENRDKIESLVTFRIPYYVGPLTVSDQSEFAWMERQSDEPIRPWNFDEIVNKERSAEKFIERMTNMDTYLLEEKVLPKRSLLYQTFEVYNELTKVRYTNEQGKTEKLNRQQKAEIIETLFKQKNRVREKDIANYLEQYGYVDGTDIKGVEDKFNASLSTYNDLAKIDGAKAYLDDPEYADVWEDIIKILTIFEDKAMRKKQLQTYSDTLSPEILKKLERKHYTGWGRFSKKLINGLRDEGSNKTILDYLKDEGSSGPTNRNFMQLIRDNTLSFKKKIEDAQTIEDTTHIYDTVAELPGSPAIKKGIRQALKIVEEIIDIIGYEPENIVVEMARESQTTKKGKDLSKERLEKLTEAIKEFDGVKVKDLKNENLRNDRLYLYYLQNGRDMYTNEPLDINNLSKYDIDHIIPQSFTTDNSIDNKVLVSRTKNQGNKSDDVPSINIVHKMKPFWRQLHKAGLISDRKFKNLTKAEHGGLTEADRAHFLNRQLVETRQITKHVANLLDSQYNTAEEQRINIVLLKSSMTSRFRKEFKLYKVREINDYHHGHDAYLNAVVATTIMKVYPNLKPQFVYGQYKKTSMFKEEKATARKHFYSNITKFFKKEKVVNEETGEILWDTERHLSTIKRVLSWKQMNIVKKVEKQKGQLWKETIYPKGDSSKLIPVKEGMDPQKYGGLSQVSEAFAVVITHEKGKKKQLKSDLISIPIVDQKAYEQHPTAYLEEAGYNNPTVLHELFKYQLFELEDGSRRMIASAKEFQKGNQMVLPLELVELLYHANRYDKVKFPDSIEYVHDNLAKFDDLLEYVIDFSNKYINADKNVQKIQKIYKEHGTEDVELTVESFVNLMTFTAMGAPATFKFYGESITRSRYTSITEFRGSTLIFQSITGLYETRYKLED

SEQ ID NO: 196 - protein, 1329 aa, Artificial Sequence
  Synthetic polypeptide
MKKDYVIGLDIGTNSVGWAVMTEDYQLVKKKMPIYGNTEKKKIKKNFWGVRLFEEGHTAEDRRLKRTARRRISRRRNRLRYLQAFFEEAMTDLDENFFARLQESFLVPEDKKWHRHPIFAKLEDEVAYHETYPTIYHLRKKLADSSEQADLRLIYLALAHIVKYRGHFLIEGKLSTENISVKEQFQQFMIIYNQTFVNGESPLPESVLIEEELTEKASRTKKSEKVLQQFPQEKANGLFGQFLKLMVGNKADFKKVFGLEEEAKITYASESYEEDLEGILAKVGDEYSDVFLAAKNVYDAVELSTILADSDKKSHAKLSSSMIVRFTEHQEDLKKFKRFIRENCPDEYDNLFKNEQKDGYAGYIAHAVSQLKFYQYVKKIIQDIAGAEYFLEKIAQENFLRKQRTFDNGVIPHQIHLAELQAIIHRQAAYYPFLKENQEKIEQLVTFRIPYYVGPLSKGDASTFAWLKRQSEEPIRPWNLQETVDLDQSATAFIERMTNFDTYLPSEKVLPKHSLLYEKFMVFNELTKISYTDDRGIKANFSGKEKEKIFDYLFKTRRKVKKKDIIQFYRNEYNTEIVTLSGLEEDQFNASFSTYQDLLKCGLTRAELDHPDNAEKLEDIIKILTIFEDRQRIRTQLSTFKGQFSAEVLKKLERKHYTGWGRLSKKLINGIYDKESGKTILGYLIDDGVSKHYNRNFMQLINDSQLSFKNAIQKAQSSEHEETLSETVNELAGSPAIKKGIYQSLKIVDELVAIMGYAPKRIVVEMARENQTTSTGKRRSIQRLKIVEKAMAEIGSNLLKEQPTTNEQLRDTRLFLYYMQNGKDMYTGDELSLHRLSHYDIDHIIPQSFMKDDSLDNLVLVGSTENRGKSDDVPSKEVVKDMKAYWEKLYAAGLISQRKFQRLTKGEQGGLTLEDKAHFIQRQLVETRQITKNVAGILDQRYNANSKEKKVQIITLKASLTSQFRSIFGLYKVREVNDYHHGQDAYLNCVVATTLLKVYPNLAPEFVYGEYPKFQTFKENKATAKAIIYTNLLRFFTEDEPRFTKDGEILWSNSYLKTIKKELNYHQMNIVKKVEVQKGGFSKESIKPKGPSNKLIPVKNGLDPQKYGGFDSPIVAYTVLFTHEKGKKPLIKQEILGITIMEKTRFEQNPILFLEEKGFLRPRVLMKLPKYTLYEFPEGRRRLLASAKEAQKGNQMVLPEHLLTLLYHAKQCLLPNQSESLAYVEQHQPEFQEILERVVDFAEVHTLAKSKVQQIVKLFEANQTADVKEIAASFIQLMQFNAMGAPSTFKFFQKDIERARYTSIKEIFDATIIYQSTTGLYETRRKVVD

SEQ ID NO: 197 - protein, 1280 aa, Artificial Sequence
  Synthetic polypeptide
MRLFEEGHTAEDRRLKRTARRRISRRRNRLRYLQAFFEEAMTDLDENFFARLQESFLVPEDKKWHRHPIFAKLEDEVAYHETYPTIYHLRKKLADSSEQADLRLIYLALAHIVKYRGHFLIEGKLSTENTSVKDQFQQFMVIYNQTFVNGESPLPESVLIEEELTEKASRTKKSEKVLQQFPQEKANGLFGQFLKLMVGNKADFKKVFGLEEEAKITYASESYEEDLEGILAKVGDEYSDVFLAAKNVYDAVELSTILADSDKKSHAKLSSSMIVRFTEHQEDLKKFKRFIRENCPDEYDNLFKNEQKDGYAGYIAHAVSQLKFYQYVKKIIQDIAGAEYFLEKIAQENFLRKQRTFDNGVIPHQIHLAELQAIIHRQAAYYPFLKENQEKIEQLVTFRIPYYVGPLSKGDASTFAWLKRQSEEPIRPWNLQETVDLDQSATAFIERMTNFDTYLPSEKVLPKHSLLYEKFMVFNELTKISYTDDRGIKANFSGKEKEKIFDYLFKTRRKVKKKDIIQFYRNEYNTEIVTLSGLEEDQFNASFSTYQDLLKCGLTRAELDHPDNAEKLEDIIKILTIFEDRQRIRTQLSTFKGQFSAEVLKKLERKHYTGWGRLSKKLINGIYDKESGKTILDYLVDDGVSKHYNRNFMQLINDSQLSFKNAIQKAQSSEHEETLSETVNELAGSPAIKKGIYQSLKIVDELVAIMGYAPKRIVVEMARENQTTSTGKRRSIQRLKIVEKAMAEIGSNLLKEQPTTNEQLRDTRLFLYYMQNGKDMYTGDELSLHRLSHYDIDHIIPQSFMKDDSLDNLVLVGSTENRGKSDDVPSKEVVKDMKAYWEKLYAAGLISQRKFQRLTKGEQGGLTLEDKAHFIQRQLVETRQITKNVAGILDQRYNAKSKEKKVQIITLKASLTSQFRSIFGLYKVREVNDYHHGQDAYLNCVVATTLLKVYPNLAPEFVYGEYPKFQTFKENKATAKAIIYTNLLRFFTEDEPRFTKDGEILWSNSYLKTIKKELNYHQMNIVKKVEVQKGGFSKESIKPKGPSNKLIPVKNGLDPQKYGGFDSPVVAYTVLFTHEKGKKPLIKQEILGITIMEKTRFEQNPILFLEEKGFLRPRVLMKLPKYTLYEFPEGRRRLLASAKEAQKGNQMVLPEHLLTLLYHAKQCLLPNQSESLAYVEQHQPEFQEILERVVDFAEVHTLAKSKVQQIVKLFEANQTADVKEIAASFIQLMQFNAMGAPSTFKFFQKDIERARYTSIKEIFDATIIYQSPTGLYETRRKVVD

SEQ ID NO: 198 - protein, 1072 aa, Enterococcus durans IPLA 655
MDEEAKIQLSKESYEEELESLLEKSGEEFRDVFLQAKKVYDAILLSDILSTKKQNSKAKLSLGMIERYDSHKKDLEELKQFVKANLPEKTAIFFKDSSKNGYAGYIDGKTTQEDFYKFLKKELNGIAGSERFMEKVDQENFLLKQRTTANGVIPHQVHLTELKAIIERQKPYYPSLEEARDKMIRLLTFRIPYYVGPLAQGEETSSFAWLERKTPEKVTPWNATEVIDYSASAMKFIQRMINYDTYLPTEKVLPKHSILYQKYTIFNELTKVAYKDERGIKHQFSSKEKREIFKELFQKQRKVTVKKLQQFLSANYNIEDAEILGVDKAFNSSYATYHDFLDLAKPNELLEQPEMNAMFEDIVKILTIFEDREMIRTQLKKYQSVLGDGFFKKLVKKHYTGWGRLSERLINGIRDKKTNKTILDYLIDDDFPYNRNRNFMQLINDDSLSFKEELANELALAGNQSLLEVVEALLGSPAIKKGIWQTLKIVEELIEIIGYNPKNIVVEMARENQRTNRSKPRLKALEEALKSFDSPLLKEQPVDNQALQKDRLYLYYLQNGKDMYTGEALDIDRLSEYDIDHIIPRSFIVDNSIDNKVLVSSKENRLKMDDVPDQKVVIRMRRYWEKLLRANLISERKFAYLTKLELTPEDKARFIQRQLVETRQITKHVAAILDQYFNQPEESKNKGIRIITLKSSLVSQFRKTFGINKVREINNHHHAHDAYLNGVVAIALLKKYPKLEPEFVYGNYTKFNLATENKATAKKEFYSNILRFFEKEEYSYDENGEIFWDKARHIPQIKKVISSHQVNIVKKVEVQTGGFYKETVNPKGKPDKLIQRKAGWDVSKYGGFGSPVVAYAVAFIYEKGKARKKAKAIEGITIMKQSLFEQDPIGFLSNKGYSNVTKFIKLSKYTLYELENGRRRMVASKEAQKANSFILPEKLVTLLYHAQHYDEIAHKESFDYVNDHLSEFREILDQVIDFSNRYTIAAKNTEKIAELFEQNQESTVQSLSQSFINLMQLNAMGAPADFKFFDVIIPRKRYPSLTEIWESTIIYQSITGLRETRTRMATLWDGEQ

SEQ ID NO: 199 - protein, 1329 aa, Enterococcus faecalis
MKKDYVIGLDIGTNSVGWAVMTEDYQLVKKKMPIYGNTEKKKIKKNFWGVRLFEEGHTAEDRRLKRTARRRISRRRNRLRYLQAFFEEAMTDLDENFFARLQESFLVPEDKKWHRHPIFAKLEDEVAYHETYPTIYHLRKKLADSSEQADLRLIYLALAHIVKYRGHFLIEGKLSTENTSVKEQFQQFMVIYNQTFVNGESPLPESVLIEEELTEKASRTKKSEKVLQQFPQEKANGLFGQFLKLMVGNKADFKKVFGLEEEAKITYASESYEEDLEGILAKVGDEYSDVFLAAKNVYDAVELSTILADSDKKSHAKLSSSMIVRFTEHQEDLKKFKRFIRENCPDEYDNLFKNEQKDGYAGYIAHAVSQLKFYQYVKKIIQDIAGAEYFLEKIAQENFLRKQRTFDNGVIPHQIHLAELQAIIHRQAAYYPFLKENQEKIEQLVTFRIPYYVGPLSKGDASTFAWLKRQSEEPIRPWNLQETVDLDQSATAFIERMTNFDTYLPSEKVLPKHSLLYEKFMVFNELTKISYTDDRGIKANFSGKEKEKIFDYLFKTRRKVKKKDIIQFYRNEYNTEIVTLSGLEEDQFNASFSTYQDLLKCGLTRAELDHPDNAEKLEDIIKILTIFEDRQRIRTQLSTFKGQFSAEVLKKLERKHYTGWGRLSKKLINGIYDKESGKTILDYLVDDGVSKHYNRNFMQLINDSQLSFKNAIQKAQSSEHEETLSETVNELAGSPAIKKGIYQSLKIVDELVAIMGYAPKRIVVEMARENQTTSTGKRRSIQRLKIVEKAMAEIGSNLLKEQPTTNEQLRDTRLFLYYMQNGKDMYTGDELSLHRLSHYDIDHIIPQSFMKDDSLDNLVLVGSTENRGKSDDVPSKKVVKKMKAYWEKLYAAGLISQRKFQRLTKGEQGGLTLEDKAHFIQRQLVETRQITKNVAGILDQRYNAKSKEKKVQIITLKASLTSQFRSIFGLYKVREVNDYHHGQDAYLNCVVATTLLKVYPNLAPEFVYGEYPKFQAFKENKATAKTIIYTNLMRFFTEDEPRFTKDSEILWSNSYLKTIKKELNYHQMNIVKKVEVQKGGFSKESIKPKGPSNKLIPVKNGLDPQKYGGFDSPVVAYTVLFTHEKGKKPLIKQEILGITIMEKTRFEQNPILFLEEKGFLRPRVLMKLPKYTLYEFPEGRRRLLASAKEAQKGNQMVLPEHLLTLLYHAKQCLLPNQSESLAYVEQHQPEFQEILERVVDFAEVHTLAKSKVQQIVKLFEANQTADVKEIAASFIQLMQFNAMGAPSTFKFFQKDIERARYTSIKEIFDATIIYQSTTGLYETRRKVVD

SEQ ID NO: 200 - protein, 1329 aa, Enterococcus faecalis
MKKDYVIGLDIGTNSVGWAVMTEDYQLVKKKMPIYGNTEKKKIKKNFWGVRLFEEGHTAEDRRLKRTARRRISRRRNRLRYLQAFFEEAMTALDENFFARLQESFLVPEDKKWHRHPIFAKLEDEVAYHETYPTIYHLRKKLADSSEQADLRLIYLALAHIVKYRGHFLIEGKLSTENISVKEQFQQFMIIYNQTFVNGESPLPESVLIEEELTEKASRTKKSEKVLQQFPQEKANGLFGQFLKLMVGNKADFKKVFGLEEEAKITYASESYEEDLEGILAKVGDEYSDVFLAAKNVYDAVELSTILADSDKKSHAKLSSSMIVRFTEHQEDLKNFKRFIRENCPDEYDNLFKNEQKDGYAGYITHAVSQLKFYQYVKKIIQDIAGAEYFLEKIAQENFLRKQRTFDNGVIPHQIHLAELQAIIHRQAAYYPFLKENQEKIEQLVTFRIPYYVGPLSKGDANTFAWLKRQSEEPIRPWNLQETVDLDQSATAFIERMTNFDTYLPSEKVLPKHSLLYEKFMVFNELTKISYTDDRGIKANFSGKEKEKIFDYLFKTRRKVKKKDIIQFYRNEYNTEIVTLSGLEEDQFNASFSTYQDLLKCGLTRAELDHPDNAEKLEDIIKILTIFEDRQRIRTQLSTFKGQFSAEVLKKLERKHYTGWGRLSKKLINGIYDKESGKTILDYLIDDGVSKHYNRNFMQLINDSQLSFKNAIQKAQSSEHEETLSETVNELAGSPAIKKGIYQSLKIVDELVAIMGYAPKRIVVEMARENQTTSTGKRRSIQRLKIVEKAMAEIGSNLLKEQPTTNEQLRDTRLFLYYMQNGKDMYTGDELSLHRLSHYDIDHIIPQSFMKDDSLDNLVLVGSTENRGKSDDVPSKEVVKDMKAYWEKLYAAGLISQRKFQRLTKGEQGGLTLEDKAHFIQRQLVETRQITKNVAGILDQRYNAKSKEKKVQIITLKASLTSQFRSIFGLYKVREVNDYHHGQDAYLNCVVATTLLKVYPNLAPEFVYGEYPKFQTFKENKATAKAIIYTNLLRFFTEDEPRFTKDGEILWSNSYLKTIKKELNYHQMNIVKKVEVQKGGFSKESIKPKGPSNKLIPVKNGLDPQKYGGFDSPIVAYTVLFTHEKGKKPLIKQEILGITIMEKTRFEQNPILFLEEKGFLRPRVLMKLPKYTLYQFPEGRRRLLASAKEAQKGNQMVLPEHLLTLLYHAKQCLLPNQSESLAYVEQHQPEFQEILERVVDFAEVHTLAKSKVQQIVKLFEANQTADVKEIAASFIQLMQFNAMGAPSTFKFFQKDIERARYTSIKEIFDATIIYQSTTGLYETRRKVVD

SEQ ID NO: 201 - protein, 1329 aa, Enterococcus faecalis
MKKDYVIGLDIGTNSVGWAVMTEDYQLVKKKMPIYGNTEKKKIKKNFWGVRLFEEGHTAEDRRLKRTARRRISRRRNRLRYLQAFFEEAMTALDENFFARLQESFLVPEDKKWHRHPIFAKLEDEVAYHETYPTIYHLRKKLADSSEQADLRLIYLALAHIVKYRGHFLIEGKLSTENISVKEQFQQFMIIYNQTFVNGESPLPESVLIEEELTEKASRTKKSEKVLQQFPQEKANGLFGQFLKLMVGNKADFKKVFGLEEEAKITYASESYEEDLEGILAKVGDEYSDVFLAAKNVYDAVELSTILADSDKKSHAKLSSSMIVRFTEHQEDLKNFKRFIRENCPDEYDNLFKNEQKDGYAGYITHAVSQLKFYQYVKKIIQDIAGAEYFLEKIAQENFLRKQRTFDNGVIPHQIHLAELQAIIHRQAAYYPFLKENQEKIEQLVTFRIPYYVGPLSKGDASTFAWLKRQSEEPIRPWNLQETVDLDQSATAFIERMTNFDTYLPSEKVLPKHSLLYEKFMVFNELTKISYTDDRGIKANFSGKEKEKIFDYLFKTRRKVKKKDIIQFYRNEYNTEIVTLSGLEEDQFNASFSTYQDLLKCGLTRAELDHPDNAEKLEDIIKILTIFEDRQRIRTQLSTFKGQFSAEVLKKLERKHYTGWGRLSKKLINGIYDKESGKTILDYLVDDGVSKHYNRNFMQLINDSQLSFKNAIQKAQSSEHEETLSETVNELAGSPAIKKGIYQSLKIVDELVAIMGYAPKRIVVEMARENQTTSTGKRRSIQRLKIVEKAMAEIGSNLLKEQPTTNEQLRDTRLFLYYMQNGKDMYTGDELSLHRLSHYDIDHIIPQSFMKDDSLDNLVLVGSTENRGKSDDVPSKEVVKDMKAYWEKLYAAGLISQRKFQRLTKGEQGGLTLEDKAHFIQRQLVETRQITKNVAGILDQRYNAKSKEKKVQIITLKASLTSQFRSIFGLYKVREVNDYHHGQDAYLNCVVATTLLKVYPNLAPEFVYGEYPKFQTFKENKATAKAIIYTNLLRFFTEDEPRFTKDGEILWSNSYLKTIKKELNYHQMNIVKKVEVQKGGFSKESIKPKGPSNKLIPVKNGLDPQKYGGFDSPIVAYTVLFTHEKGKKPLIKQEILGITIMEKTRFEQNPILFLEEKGFLRPRVLMKLPKYTLYEFPEGRRRLLASAKEAQKGNQMVLPEHLLTLLYHAKQCLLPNQSESLAYVEQHQPEFQEILERVVDFAEVHTLAKSKVQQIVKLFEANQTADVKEIAASFIQLMQFNAMGAPSTFKFFQKDIERARYTSIKEIFDATIIYQSTTGLYETRRKVVD

SEQ ID NO: 202 - protein, 1329 aa, Enterococcus faecalis
MKKDYVIGLDIGTNSVGWAVMTEDYQLVKKKMPIYGNTEKKKIKKNFWGVRLFEEGHTAEDRRLKRTARRRISRRRNRLRYLQAFFEEAMTDLDENFFARLQESFLVPEDKKWHRHPIFAKLEDEVAYHETYPTIYHLRKKLADSSEQADLRLIYLALAHIVKYRGHFLIEGKLSTENISVKEQFQQFMIIYNQTFVNGESPLPESVLIEEELTEKASRTKKSEKVLQQFPQEKANGLFGQFLKLMVGNKADFKKVFGLEEEAKITYASESYEEDLEGILAKVGDEYSDVFLAAKNVYDAVELSTILADSDKKSHAKLSSSMIVRFTEHQEDLKKFKRFIRENCPDEYDNLFKNEQKDGYAGYIAHAVSQLKFYQYVKKIIQDIAGAEYFLEKIAQENFLRKQRTFDNGVIPHQIHLAELQAIIHRQAAYYPFLKENQEKIEQLVTFRIPYYVGPLSKGDASTFAWLKRQSEEPIRPWNLQETVDLDQSATAFIERMTNFDTYLPSEKVLPKHSLLYEKFMVFNELTKISYTDDRGIKANFSGKEKEKIFDYLFKTRRKVKKKDIIQFYRNEYNTEIVTLSGLEEDQFNASFSTYQDLLKCGLTRAELDHPDNAEKLEDIIKILTIFEDRQRIRTQLSTFKGQFSAEVLKKLERKHYTGWGRLSKKLINGIYDKESGKTILDYLVDDGVSKHYNRNFMQLINDSQLSFKNAIQKAQSSEHEETLSETVNELAGSPAIKKGIYQSLKIVDELVAIMGYAPKRIVVEMARENQTTSTGKRRSIQRLKIVEKAMAEIGSNLLKEQPTTNEQLRDTRLFLYYMQNGKDMYTGDELSLHRLSHYDIDHIIPQSFMKDDSLDNLVLVGSTENRGKSDDVPSKEVVKDMKAYWEKLYAAGLISQRKFQRLTKGEQGGLTLEDKAHFIQRQLVETRQITKNVAGILNQRYNANSKEKKVQIITLKASLTSQFRSIFGLYKVREVNDYHHGQDAYLNCVVATTLLKVYPNLAPEFVYGEYPKFQTFKENKATAKAIIYTNLLRFFTEDEPRFTKDGEILWSNSYLKTIKKELNYHQMNIVKKVEVQKGGFSKESIKPKGPSNKLIPVKNGLDPQKYGGFDSPVVAYTVLFTHEKGKKPLIKQEILGITIMEKTRFEQNPILFLEEKGFLRPRVLMKLPKYTLYEFPEGRRRLLASAKEAQKGNQMVLPEHLLTLLYHAKQCLLPNQSESLAYVEQHQPEFQEILERVVDFAEVHTLAKSKVQQIVKLFEANQTADVKEIAASFIQLMQFNAMGAPSTFKFFQKDIERARYTSIKEIFDATIIYQSTTGLYETRRKVVD

SEQ ID NO: 203 - protein, 1331 aa, Enterococcus faecalis
MKKDYVIGLDIGTNSVGWAVMTEDYQLVKKKMPIYGNTEKKKIKKNFWGVRLFEEGHTAEDRRLKRTARRRISRRRNRLRYLQAFFEEAMTALDENFFARLQESFLVPEDKKWHRHPIFAKLEDEVAYHETYPTIYHLRKKLADSSEQADLRLIYLALAHIVKYRGHFLIEGKLSTENISVKEQFQQFMIIYNQTFVNGESPLPESVLIEEELTEKASRTKKSEKVLQQFPQEKANGLFGQFLKLMVGNKADFKKVFGLEEEAKIKITYASESYEEDLEGILAKVGDEYSDVFLAAKNVYDAVELSTILADSDKKSHAKLSSSMIVRFTEHQEDLKNFKRFIRENCPDEYDNLFKNEQKDGYAGYIAHAVSQLKFYQYVKKIIQDIAGAEYFLEKIAQENFLRKQRTFDNGVIPHQIHLAELQAIIHRQAAYYPFLKENQKKIEQLVTFRIPYYVGPLSKGDASTFAWLKRQSEEPIRPWNLQETVDLDQSATAFIERMTNFDTYLPSEKVLPKHSLLYEKFMVFNELTKISYTDDRGIKANFSGKEKEKIFDYLFKTRRKVKKKDIIQFYRNEYNTEIVTLSGLEEDQFNASFSTYQDLLKCGLTRAELDHPDNAEKLEDIIKILTIFEDRQRIRTQLSTFKGQFSEEVLKKLERKHYTGWGRLSKKLINGIYDKESGKTILDYLIDDGVSKHYNRNFMQLINDSQLSFKNAIQKAQSSEHEETLSETVNELAGSPAIKKGIYQSLKIVDELVAIMGYAPKRIVVEMARENQTTSTGKRRSIQRLKIVEKAMAEIGSNLLKEQPTTNEQLRDTRLFLYYMQNGKDMYTGDELSLHRLSHYDIDHIIPQSFMKDDSLDNLVLVGSTENRGKSDDVPSKEVVKKMKAYWEKLYAAGLISQRKFQRLTKGEQGGLTLEDKAHFIQRQLVETRQITKNVAGILDQRYNAKSKEKKVQIITLKASLTSQFRSIFGLYKVREVNDYHHGQDAYLNCVVATTLLKVYPNLAPEFVYGEYPKFQAFKENKATAKAIIYTNLLRFFTEDEPRFTKDGEILWSNSYLKTIKKELNYHQMNIVKKVEVQKGGFSKESIKPKGPSNKLIPVKNGLDPQKYGGFDSPVVAYTVLFTHEKGKKPLIKQEILGITIMEKTRFEQNPILFLEEKGFLRPRVLMKLPKYTLYEFPEGRRRLLASAKEAQKGNQMVLPEHLLTLLYHAKQCLLPNQSESLAYVEQHQPEFQEILERVVDFAEVHTLAKSKVQQIVKLFEANQTADVKEIAASFIQLMQFNAMGAPSTFKFFQKDIERARYTSIKEIFDATIIYQSTTGLYETRRKVVD

SEQ ID NO: 204 - protein, 1329 aa, Enterococcus faecalis
MKKDYVIGLDIGTNSVGWAVMTEDYQLVKKKMPIYGNTEKKKIKKNFWGVRLFEEGHTAEDRRLKRTARRRISRRRNRLRYLQAFFEEAMTALDENFFARLQESFLVPEDKKWHRHPIFAKLEDEVAYHETYPTIYHLRKKLADSSEQADLRLIYLALAHIVKYRGHFLIEGKLSTENISVKEQFQQFMIIYNQTFVNGESPLPESVLIEEELTEKASRTKKSEKVLQQFPQEKANGLFGQFLKLMVGNKADFKKVFGLEEEAKITYASESYEEDLEGILAKVGDEYSDVFLAAKNVYDAVELSTILADSDKKSHAKLSSSMIVRFTEHQEDLKKFKRFIRENCPDEYDNLFKNEQKDGYAGYIAHAVSQLKFYQYVKKIIQDIAGAEYFLEKIAQENFLRKQRTFDNGVIPHQIHLAELQAIIHRQAAYYPFLKENQEKIEQLVTFRIPYYVGPLSKGDASTFAWLKRQSEEPIRPWNLQETVDLDQSATAFIERMTNFDTYLPSEKVLPKHSLLYEKFMVFNELTKISYTDDRGIKANFSGKEKEKIFDYLFKTRRKVKKKDIIQFYRNEYNTEIVTLSGLEEDQFNASFSTYQDLLKCGLTRAELDHPDNAEKLEDIIKILTIFEDRQRIRTQLSTFKGQFSAEVLKKLERKHYTGWGRLSKKLINGIYDKESGKTILGYLIDDGVSKHYNRNFMQLINDSQLSFKNAIQKAQSSEHEETLSETVNELAGSPAIKKGIYQSLKIVDELVAIMGYAPKRIVVEMARENQTTSTGKRRSIQRLKIVEKAMAEIGSNLLKEQPTTNEQLRDTRLFLYYMQNGKDMYTGDELSLHRLSHYDIDHIIPQSFMKDDSLDNLVLVGSTENRGKSDDVPSKEVVKDMKAYWEKLYAAGLISQRKFQRLTKGEQGGLTLEDKAHFIQRQLVETRQITKNVAGILDQRYNAKSKEKKVQIITLKASLTSQFRSIFGLYKVREVNDYHHGQDAYLNCVVATTLLKVYPNLAPEFVYGEYPKFQTFKENKATAKAIIYTNLLRFFTEDEPRFTKDGEILWSNSYLKTIKKELNYHQMNIVKKVEVQKGGFSKESIKPKGPSNKLIPVKNGLDPQKYGGFDSPIVAYTVLFTHEKGKKPLIKQEILGITIMEKTRFEQNPILFLEEKGFLRPRVLMKLPKYTLYEFPEGRRRLLASAKEAQKGNQMVLPEHLLTLLYHAKQCLLPNQSESLAYVEQHQPEFQEILERVVDFAEVHTLAKSKVQQIVKLFEANQTADVKEIAASFIQLMQFNAMGAPSTFKFFQKDIERARYTSIKEIFDATIIYQSTTGLYETRRKVVD

SEQ ID NO: 205 - protein, 1329 aa, Enterococcus faecalis
MKKDYVIGLDIGSNSVGWAVMTEDYQLVKKKMPIYGNTEKKKIKKNFWGVRLFEEGHTAEDRRLKRTARRRISRRRNRLRYLQAFFEEAMTDLDENFFARLQESFLVPEDKKWHRHPIFAKLEDEVAYHETYPTIYHLRKKLADSSEQADLRLIYLALAHIVKYRGHFLIEGKLSTENTSVKDQFQQFMVIYNQTFVNGESPLPESVLIEEELTEKASRTKKSEKVLQQFPQEKANGLFGQFLKLMVGNKADFKKVFGLEEEAKITYASESYEEDLEGILAKVGDEYSDVFLAAKNVYDAVELSTILADSDKKSHAKLSSSMIVRFTEHQEDLKNFKRFIRENCPDEYDNLFKNEQKDGYAGYITHAVSQLKFYQYVKKIIQDIAGAEYFLEKIAQENFLRKQRTFDNGVIPHQIHLAELQAIIHRQAAYYPFLKENQEKIEQLVTFRIPYYVGPLSKGDASTFAWLKRQSEEPIRPWNLQETVDLDQSATAFIERMTNFDTYLPSEKVLPKHSLLYEKFMVFNELTKISYTDDRGIKANFSGKEKEKIFDYLFKTRRKVKKKDIIQFYRNEYNTEIVTLSGLEEDQFNASFSTYQDLLKCGLTRAELDHPDNAEKLEDIIKILTIFEDRQRIRTQLSTFKGQFSAEVLKKLERKHYTGWGRLSKKLINGIYDKESGKTILDYLIDDGVSKHYNRNFMQLINDSQLSFKNAIQKAQSSEHEETLSETVNELAGSPAIKKGIYQSLKIVDELVAIMGYAPKRIVVEMARENQTTSTGKRRSIQRLKIVEKAMAEIGSNLLKEQPTTNEQLRDTRLFLYYMQNGKDMYTGDELSLHRLSHYDIDHIIPQSFMKDDSLDNLVLVGSTENRGKSDDVPSKEVVKDMKAYWEKLYAAGLISQRKFQRLTKGEQGGLTLEDKAHFIQRQLVETRQITKNVAGILDQLYNAKSKEKKVQIITLKASLTSQFRSIFGLYKVREVNDYHHGQDAYLNCVVATTLLKVYPNLAPEFVYGEYPKFQTFKENKATAKTIIYTNLMRFFTEDEPRFTKDGEILWSNSYLKTIKKELNYHQMNIVKKVEVQKGGFSKESIKPKGPSNKLIPVKNGLDPQKYGGFDSPVVAYTVLFTHEKGKKPLIKQEILGITIMEKTRFEQNPILFLEEKGFLRPRVLMKLPKYTLYEFPEGRRRLLASAKEAQKGNQMVLPEHLLTLLYHAKQCLLPNQSESLAYVEQHQPEFQEILERVVDFAEVHTLAKSKVQQIVKLFEANQTADVKEIAASFIQLMQFNAMGAPSTFKFFQKDIERARYTSIKEIFDATIIYQSTTGLYETRRKVVD

SEQ ID NO: 206 - protein, 1329 aa, Enterococcus faecalis
MKKDYVIGLDIGTNSVGWAVMTEDYQLVKKKMPIYGNTEKKKIKKNFWGVRLFEEGHTAEDRRLKRTARRRISRRRNRLRYLQAFFEEAMTALDENFFARLQESFLVPEDKKWHRHPIFAKLEDEVAYHETYPTIYHLRKKLADSSEQADLRLIYLALAHIVKYRGHFLIEGKLSTENISVKEKFQQFMIIYNQTFVNGEGPLPESVLIEEELTEKASRTKKSEKVLQQFPQEKANGLFGQFLKLMVGNKADFKKVFGLEEEAKITYASESYEEDLEGILAKVGDEYSDVFLAAKNVYDAVELSTILADSDKKSYAKLSSSMIVRFTEHQEDLKKFKRFIRENCPDEYDNLFKNEQKDGYAGYIAHAVSQLKFYQYVKKIIQDIAGAEYFLEKIAQENFLRKQRTFDNGVIPHQIHLAELQAIIHRQAAYYPFLKENQEKIEQLVTFRIPYYVGPLSKGDASTFAWLKRQSEEPIRPWNLQETVDLDQSATAFIERMTNFDTYLPSEKVLPKHSLLYEKFMVFNELTKISYTDDRGIKANFSGKEKEKIFDYLFKTRRKVKKKDIIQFYRNEYNTEIVTLSGLEEDQFNASFSTYQDLLKCGLTRAELDHPDNAEKLEDIIKILTIFEDRQRIRTQLSTFKGQFSAEVLKKLERKHYTGWGRLSKKLINGIYDKESGKTILDYLVDDGVSKHYNRNFMQLINDSQLSFKNAIQKAQSSEHEETLSETVNELAGSPAIKKGIYQSLKIVDELVAIMGYAPKRIVVEMARENQTTSTGKRRSIQRLKIVEKAMAEIGSNLLKEQPTTNEQLRDTRLFLYYMQNGKDMYTGDELSLHRLSHYDIDHIIPQSFMKDDSLDNLVLVGSTENRGKSDDVPSKEVVKDMKAYWEKLYAAGLISQRKFQRLTKGEQGGLTLEDKAHFIQRQLVETRQITKNVAGILDQRYNAKSKEKKVQIITLKASLTSQFRSIFGLYKVREVNDYHHGQDAYLNCVVATTLLKVYPNLAPEFVYGEYPKFQTFKENKATAKAIIYTNLLRFFTEDEPRFTKDGEILWSNSYLKTIKKELNYHQMNIVKKVEVQKGGFSKESIKPKGPSNKLIPVKNGLDPQKYGGFDSPIVAYTVLFTHEKGKKPLIKQEILGITIMEKTRFEQNPILFLEEKGFLRPRVLMKLPKYTLYEFPEGRRRLLASAKEAQKGNQMVLPEHLLTLLYHAKQCLLPNQSESLAYVEQHQPEFQEILERVVDFAEVHTLAKSKVQQIVKLFEANQTADVKEIAASFIQLMQFNAMGAPSTFKFFQKDIERARYTSIKEIFDATIIYQSTTGLYETRRKVVD

SEQ ID NO: 207 - protein, 1329 aa, Enterococcus faecalis
MKKDYVIGLDIGTNSVGWAVMTEDYQLVKKKMPIYGNTEKKKIKKNFWGVRLFEEGHTAEDRRLKRTARRRISRRRNRLRYLQAFFEEAMTALDENFFARLQESFLVPEDKKWHRHPIFAKLEDEVAYHETYPTIYHLRKKLADSSEQADLRLIYLALAHIVKYRGHFLIEGKLSTENISVKDQFQQFMVIYNQTFVNGESPLPESVLIEEELTEKASRTKKSEKVLQQFPQEKANGLFGQFLKLMVGNKADFKKVFGLEEEAKITYASESYEEDLEGILAKVGDEYSDVFLAAKNVYDAVELSTILADSDKKSHAKLSSSMIVRFTEHQEDLKNFKRFIRENCPDEYDNLFKNEQKDGYAGYIAHAVSQLKFYQYVKKIIQDIAGAEYFLEKIAQENFLRKQRTFDNGVIPHQIHLAELQAIIHRQAAYYPFLKENQKKIEQLVTFRIPYYVGPLSKGDASTFAWLKRQSEEPIRPWNLQETVDLDQSATAFIERMTNFDTYLPSEKVLPKHSLLYEKFMVFNELTKISYTDDRGIKANFSGKEKEKIFDYLFKTRRKVKKKDIIQFYRNEYNTEIVTLSGLEEDQFNASFSTYQDLLKCGLTRAELDHPDNAEKLEDIIKILTIFEDRQRIRTQLSTFKGQFSAEVLKKLERKHYTGWGRLSKKLINGIYDKESGKTILDYLIDDGVSKHYNRNFMQLINDSQLSFKNAIQKAQSSEHEETLSETVNELAGSPAIKKGIYQSLKIVDELVAIMGYAPKRIVVEMARENQTTSTGKRRSIQRLKIVEKAMAEIGSNLLKEQPTTNEQLRDTRLFLYYMQNGKDMYTGDELSLHRLSHYDIDHIIPQSFMKDDSLDNLVLVGSTENRGKSDDVPSKEVVKKMKAYWEKLYAAGLISQRKFQRLTKGEQGGLTLEDKAHFIQRQLVETRQITKNVAGILDQRYNAKSKEKKVQIITLKASLTSQFRSIFGLYKVREVNDYHHGQDAYLNCVVATTLLKVYPNLAPEFVYGEYPKFQAFKENKAMAKAIIYTNLLRFFTEDEPRFTKDGEILWSNSYLKTIKKELNYHQMNIVKKVEVQKGGFSKESIKPKGPSNKLIPVKNGLDPQKYGGFDSPVVAYTVLFTHEKGKKPLIKQEILGITIMEKTRFEQNPILFLEEKGFLRPRVLMKLPKYTLYEFPEGRRRLLASAKEAQKGNQMVLPERLLTLLYHAKQCLLPNQSESLAYVEQHQPEFQEILERVVDFAEVHTLAKSKVQQIVKLFEANQTADVKEIAASFIQLMQFNAMGAPSTFKFFQKDIERARYTSIKEIFDATIIYQSTTGLYETRRKVVD

SEQ ID NO: 208 - protein, 1329 aa, Enterococcus faecalis
MKKDYVIGLDIGTNSVGWAVMTEDYQLVKKKMPIYGNTEKKKIKKNFWGVRLFEEGHTAEDRRLKRTARRRISRRRNRLRYLQAFFEEAMTALDENFFARLQESFLVPEDKKWHRHPIFAKLEDEVAYHETYPTIYHLRKKLADSSEQADLRLIYLALAHIVKYRGHFLIEGKLSTENISVKEQFQQFMIIYNQTFVNGESPLPESVLIEEELTEKASRTKKSEKVLQQFPQEKANGLFGQFLKLMVGNKADFKKVFGLEEEAKITYASESYEEDLEGILAKVGDEYSDVFLAAKNVYDAVELSTILADSDKKSHAKLSSSMIVRFTEHQEDLKKFKRFIRENCPDEYDNLFKNEQKDGYAGYIAHAVSQLKFYQYVKKIIQDIAGAEYFLEKIAQENFLRKQRTFDNGVIPHQIHLAELQAIIHRQAAYYPFLKENQEKIEQLVTFRIPYYVGPLSKGDASTFAWLKRQNEKPIRPWNLQETVDLDQSATAFIERMTNFDTYLPSEKVLPKHSLLYEKFMVFNELTKISYTDDRGIKANFSGKEKEKIFDYLFKTRRKVKKKDIIQFYRNEYNTEIVTLSGLEEDQFNASFSTYQDLLKCGLTRAELDHPDNAEKLEDIIKILTIFEDRQRIRTQLSTFKGQFSAEVLKKLERKHYTGWGRLSKKLINGIYDKESGKTILDYLIDDGVSKHYNRNFMQLINDSQLSFKNAIQKAQSSEHEETLSETVNELAGSPAIKKGIYQSLKIVDELVAIMGYAPKRIVVEMARENQTTSTGKRRSIQRLKIVEKAMAEIGSNLLKEQPTTNEQLRDTRLFLYYMQNGKDMYTGDELSLHRLSHYDIDHIIPQSFMKDDSLDNLVLVGSTENRGKSDDVPSKEVVKKMKAYWEKLYAAGLISQRKFQRLTKGEQGGLTLEDKAHFIQRQLVETRQITKNVAGILDQRYNAKSKEKKVQIITLKASLTSQFRSIFGLYKVREVNDYHHGQDAYLNCVVATTLLKVYPNLAPEFVYGEYPKFQAFKENKATAKAIIYTNLMRFFTEVEPRFTKDGEILWSNSYLKTIKKELNYHQMNIVKKVEVQKGGFSKESIKPKGPSNKLIPVKNGLDPQKYGGFDSPVVAYTVLFTHEKGKKPLIKQEILGITIMEKTKFEQNPILFLEEKGFLRPRVLMKLPKYTLYEFPEGRRRLLASAKEAQKGNQMVLPEHLLTLLYHAKQCLLPNQSESLAYVEQHQPEFQEILERVVDFAEVHTLAKSKVQQIVKLFETNQTADVKEIAASFIQLMQFNAMGAPSTFKFFQKDIERARYTSIKEIFDATIIYQSTTGLYETRRKVVD

SEQ ID NO: 209 - protein, 1329 aa, Enterococcus faecalis
MKKDYVIGLDIGTNSVGWAVMTEDYQLVKKKMPIYGNTEKKKIKKNFWGVRLFEEGHTAEDRRLKRTARRRISRRRNRLRYLQAFFEEAMTALDENFFARLQESFLVPEDKKWHRHPIFAKLEDEVAYHETYPTIYHLRKKLADSSEQADLRLIYLALAHIVKYRGHFLIEGKLSTENISVKEQFQQFMIIYNQTFVNGESPLPESVLIEEELTEKASRTKKSEKVLQQFPQEKANGLFGQFLKLMVGNKADFKKVFGLEEEAKITYASESYEEDLEGILAKVGDEYSDVFLAAKNVYDAVELSTILADSDKKSHAKLSSSMIVRFTEHQEDLKNFKRFIRENCPDEYDNLFKNEQKDGYAGYIAHAVSQLKFYQYVKKIIQDIAGAEYFLEKIAQENFLRKQRTFDNGVIPHQIHLAELQAIIHRQAAYYPFLKENQKKIEQLVTFRIPYYVGPLSKGDASTFAWLKRQSEEPIRPWNLQETVDLDQSATAFIERMTNFDTYLPSEKVLPKHSLLYEKFMVFNELTKISYTDDRGIKANFSGKEKEKIFDYLFKTRRKVKKKDIIQFYRNEYNTEIVTLSGLEEDQFNASFSTYQDLLKCGLTRAELDHPDNAEKLEDIIKILTIFEDRQRIRTQLSTFKGQFSEEVLKKLERKHYTGWGRLSKKLINGIYDKESGKTILDYLIDDGVSKHYNRNFMQLINDSQLSFKNAIQKAQSSEHEETLSETVNELAGSPAIKKGIYQSLKIVDELVAIMGYAPKRIVVEMARENQTTSTGKRRSIQRLKIVEKAMAEIGSNLLKEQPTTNEQLRDTRLFLYYMQNGKDMYTGDELSLHRLSHYDIDHIIPQSFMKDDSLDNLVLVGSTENRGKSDDVPSKEVVKKMKAYWEKLYAAGLISQRKFQRLTKGEQGGLTLEDKAHFIQRQLVETRQITKNVAGILDQRYNAKSKEKKVQIITLKASLTSQFRSIFGLYKVREVNDYHHGQDAYLNCVVATTLLKVYPNLAPEFVYGEYPKFQAFKENKATAKAIIYTNLLRFFTEDEPRFTKDGEILWSNSYLKTIKKELNYHQMNIVKKVEVQKGGFSKESIKPKGPSNKLIPVKNGLDPQKYGGFDSPVVAYTVLFTHEKGKKPLIKQEILGITIMEKTRFEQNPILFLEEKGFLRPRVLMKLPKYTLYEFPEGRRRLLASAKEAQKGNQMVLPEHLLTLLYHAKQCLLPNQSESLAYVEQHQPEFQEILERVVDFAEVHTLAKSKVQQIVKLFEANQTADVKEIAASFIQLMQFNAMGAPSTFKFFQKDIERARYTSIKEIFDATIIYQSTTGLYETRRKVVD

SEQ ID NO: 210 - protein, 1328 aa, Enterococcus faecium
MKKEYTIGLDIGTNSVGWSVLTDDYRLVSKKMKVAGNTEKSSTKKNFWGVRLFDEGQTAEARRSKRTARRRLARRRQRILELQKIFAPEILKIDEHFFARLNESFLVLDEKKQSRHPVFATIKQEKSYHQTYPTIYHLRQALADSSEKADIRLVYLAMAHLLKYRGHFLIEGELNTENSSVTETFRQFLSTYNQQFSEADKLDEAVDCSFVFTEKMSKTKKAETLLKYFPHEKSNGYLSQFIKLMVGNQGNFKNVFGLEEAKLQFSKETYEEDLEELLEKIGDDYIDLFVQAKNVYDAVLLSEILSDSTKNTRAKLSAGMIRRYDAHKEDLVLLKRFVKENLPKKYRAFFGDNSVNGYAGYIEGHATQEDFYKFVKKELTGIRGSEVFLTKIEQENFLRKQRTFDNGVIPHQIHLTELRAIIANQKKHYPFLKEEQEKLESLLTFKIPYYVGPLAKKQENSPFAWLIRKSEEKIKPWNLPEIVDMEGSAVRFIERMINTDMYMPHNKVLPKNSLLYQKFSIYNELTKVRYQDERGQMNYFSSIEKKEIFHELFEKNRKVTKKDLQEFLYLKYDIKHAELSGIEKAFNASYTTYHDFLTMSENKQWLEDPELASMFEEIIKTLTVFEDREMIKTRLSHHEATLGKHIIKKLTKKHYTGWGRLSKELIQGIRDKQSNKTILDYLIDDDFPHHRNRNFMQLINDDSLSFKKEIKKAQMITDTENLEEIVKELTGSPAIKKGILQSLKIVDEIVGIMGYEPANIVVEMARENQTTGRGLKSSRPRLKALEESLKDFGSQLLKEYPTDNSSLQKDRLYLYYLQNGRDMYTGAPLDIHRLSDYDIDHIIPRSFTTDNSIDNKVLVSSKENRLKKDDVPSEKVVKKMRSFWYDLYSSKLISKRKLDNLTKIKLTEEDKAGFIKRQLVETRQITKHVAGILHHRFNKAEDTNEPIRKVRIITLKSALVSQFRNRFGIYKVREINEYHHAHDAYLNGVVALALLKKYPQLAPEFVYGEYLKFNAHKANKATVKKEFYSNIMKFFESDTPVCDENGEIFWDKSKSIAQVKKVINHHHMNIVKKTEIQKGGFSKETVEPKKDSSKLLPRKNNWDPAKYGGLGSPNVAYTVAFTYEKGKARKRTNALEGITIMEREAFEQSPVLFLKNKGYEQAEIEMKLPKYALFELENGRKRMVASKEAQKANSFLLPEHLVTLLYHAKQYDEISHKESFDYVNEHHKEFSEVFARVLEFAGKYTLAEKNIEKLEKIYKENQTDDLAKLASSFVNLMQFNAMGAPADFKFFDVTIPRKRYTSLTEIWQSTIIHQSITGLYETRIRMGK

SEQ ID NO: 211 - protein, 1329 aa, Enterococcus faecium
MKKEYTIGLDIGTNSVGWSVLTDDYRLVSKKMKVAGNTEKSSTKKNFWGVRLFDEGQTAEARRSKRTARRRLARRRQRILELQKIFAPEILKIDEHFFARLNESFLVPDEKKQSRHPVFATIKQEKSYHQTYPTIYHLRQALADSSEKADIRLVYLAMAHLLKYRGHFLIEGELNTENSSVTETFRQFLSTYNQQFSEAGKLDEAVDCSFVFTEKMSKTKKAETLLKYFPHEKSNGYLSQFIKLMVGNQGNFKNVFGLEEEAKLQFSKETYEEDLEELLEKIGDDYIDLFVQAKNVYDAVLLSEILSDSTKNTRAKLSAGMIRRYDAHKEDLVLLKRFVKENLPKKYRAFFGDNSVNGYAGYIEGHATQEAFYKFVKKELTGIRGSEVFLTKIEQENFLRKQRTFDNGVIPHQIHLSELRAIIANQKKHYPFLKEEQEKLESLLTFKIPYYVGPLAKKQENSPFAWLIRKSEEKIKPWNLPEIVDMEGSAVRFIERMINTDMYMPHNKVLPKNSLLYQKFSIYNELTKVRYQDERGQMNYFSSIEKKEIFHELFEKNRKVTKKDLQEFLYLKYDIKHAELSGIEKAFNASYTTYHDFLTMSENKQWLEDPELASMFEEIIKTLTVFEDREMIKTRLSHHEATLGKHIIKKLTKKHYTGWGRLSKELIQGIRDKQSNKTILDYLIDDDFPHHRNRNFMQLINDDSLSFKKEIKKAQMITDTENLEEIVKELTGSPAIKKGILQSLKIVDEIVGIMGYEPANIVVEMARENQTTGRGLKSSRPRLKALEESLKDFGSQLLKEYPTDNSSLQKDRLYLYYLQNGRDMYTGAPLDIHRLSDYDIDHIIPRSFTTDNSIDNKVLVSSKENRLKKDDVPSEKVVKKMRSFWYDLYSSKLISKRKLDNLTKIKLTEEDKAGFIKRQLVETRQITKHVAGILHHRFNKAEDTNDPIRKVRIITLKSALVSQFRNRFGIYKVREINEYHHAHDAYLNGVVALALLKKYPQLAPEFVYGEYLKFNAHKANKATVKKEFYSNIMKFFESDTPVCDENGEIFWDKSKSIAQVKKVINHHHMNIVKKTEIQKGGFSKETVEPKKDSSKLLPRKNNWDPAKYGGLGSPNVAYTVAFTYEKGKARKRTNALEGITIMEREAFEQSPVLFLKNKGYEQAEIEMKLPKYALFELENGRKRMVASKEAQKANSFLLPEHLVTLLYHAKQYDEISHKESFDYVNEHHKEFSEVFARVLEFAGKYTLAEKNIEKLEKIYKENQTDDLAKLASSFVNLMQFNAMGAPADFKFFDVTIPRKRYTSLTEIWQSTIIHQSITGLYETRIRMGK

SEQ ID NO: 212 - protein, 1329 aa, Enterococcus faecium
MKKEYTIGLDIGTNSVGWSVLTDDYRLVSKKMKVAGNTEKSSTKKNFWGVRLFDEGQTAEARRSKRTARRRLARRRQRILELQKIFAPEILKIDEHFFARLNESFLVLDEKKQSRHPVFATIKQEKSYHQTYPTIYHLRQALADSSEKADIRLVYLAMAHLLKYRGHFLIEGELNTENSSVTETFRQFLSTYNQQFSEADKLDEAVDCSFVFTEKMSKTKKAETLLKYFPHEKSNGYLSQFIKLMVGNQGNFKNVFGLEEEAKLQFSKETYEEDLEELLEKIGDDYIDLFVQAKNVYDAVLLSEILSDSTKNTRAKLSAGMIRRYDAHKEDLVLLKRFVKENLPKKYRAFFGDNSVNGYAGYIEGHATQEDFYKFVKKELTGIRGSEVFLTKIEQENFLRKQRTFDNGVIPHQIHLTELRAIIANQKKHYPFLKEEQEKLESLLTFKIPYYVGPLAKKQENSPFAWLIRKSEEKIKPWNLPEIVDMEGSAVRFIERMNNTDMYIPHNKVLPKNSLLYQKFSIYNELTKVRYQDERGQMNYFSSIEKKEIFHELFEKNRKVTKKDLQEFLYLKYDIKHAELSGIEKAFNASYTTYHDFLTMSENKQWLEDPELASMFEEIIKTLTVFEDREMIKTRLSHHEATLGKHIIKKLTKKHYTGWGRLSKELIQGIRDKQSNKTILDYLIDDDFPHHRNRNFMQLINDDSLSFKKEIKKAQMITDTENLEEIVKELTGSPAIKKGILQSLKIVDEIVGIMGYEPANIVVEMARENQTTGRGLKSSRPRLKALEESLKDFGSQLLKEYPTDNSSLQKDRLYLYYLQNGRDMYTGAPLDIHRLSDYDIDHIIPRSFTTDNSIDNKVLVSSKENRLKKDDVPSEKVVKKMRSFWYDLYSSKLISKRKLDNLTKIKLTEEDKAGFIKRQLVETRQITKHVAGILHHRFNKAEDTNEPIRKVRIITLKSALVSQFRNRFGIYKVREINEYHHAHDAYLNGVVALALLKKYPQLAPEFVYGEYLKFNAHKANKATVKKEFYSNIMKFFESDTPVCDENGEIFWDKSKSIAQVKKVINHHHMNIVKKTEIQKGGFSKETVEPKKDSSKLLPRKNNWDPAKYGGLGSPNVAYTVAFTYEKGKARKRTNALEGITIMEREAFEQSPVLFLKNKGYEQAEIEMKLPKYALFELENGRKRMVASKEAQKANSFLLPEHLVTLLYHAKQYDEISHKESFDYVNEHHKEFSEVFARVLEFAGKYTLAEKNIEKLEKIYKENQTDDLAKLASSFVNLMQFNAMGAPADFKFFDVTIPRKRYTSLTEIWQSTIIHQSITGLYETRIRMGK

SEQ ID NO: 213 - protein, 1329 aa, Enterococcus faecium
MKKEYTIGLDIGTNSVGWSVLTDDYRLVSKKMKVAGNTEKSSTKKNFWGVRLFDEGQTAEARRSKRTARRRLARRRQRILELQKIFAPEILKIDEHFFARLNESFLVLDEKKQSRHPVFATIKQEKSYHQTYPTIYHLRQALADSSEKADIRLVYLAMAHLLKYRGHFLIEGELNTENSSVTETFRQFLSTYNQQFSEADKLDEAVDCSFVFTEKMSKTKKAETLLKYFPHEKSNGYLSQFIKLMVGNQGNFKNVFGLEEEAKLQFSKETYEEDLEELLEKIGDDYIDLFVQAKNVYDAVLLSEILSDSTKNTRAKLSAGMIRRYDAHKEDLVLLKRFVKENLPKKYRAFFGDNSVNGYAGYIEGHATQEDFYKFVKKELTGIRGSEVFLTKIEQENFLRKQRTFDNGVIPHQIHLTELRAIIANQKKHYPFLKEEQEKLESLLTFKIPYYVGPLAKKQENSPFAWLIRKSEEKIKPWNLPEIVDMEGSAVRFIERMINTDMYIPHNKVLPKNSLLYQKFSIYNELTKVRYQDERGQMNYFSSIEKKEIFHELFEKNRKVTKKDLQEFLYLKYDIKHAELSGIEKAFNASYTTYHDFLTMSENKQWLEDPELASMFEEIIKTLTVFEDREMIKTRLSHHEATLGKHIIKKLTKKHYTGWGRLSKELIQGIRDKQSNKTILDYLIDDDFPHHRNRNFMQLINDDSLSFKKEIKKAQMITDTENLEEIVKELTGSPAIKKGILQSLKIVDEIVGIMGYEPANIVVEMARENQTTGRGLKSSRPRLKALEESLKDFGSQLLKEYPTDNSSLQKDRLYLYYLQNGRDMYTGAPLDIHRLSDYDIDHIIPRSFTTDNSIDNKVLVSSKENRLKKDDVPSEKVVKKMRSFWYDLYSSKLISKRKLDNLTKIKLTEEDKAGFIKRQLVETRQITKHVAGILHHRFNKAEDTNEPIRKVRIITLKSALVSQFRNRFGIYKVREINEYHHAHDAYLNGVVALALLKKYPQLAPEFVYGEYLKFNAHKANKATVKKEFYSNIMKFFESDTPVCDENGEIFWDKSKSIAQVKKVINHHHMNIVKKTEIQKGGFSKETVEPKKDSSKLLPRKNNWDPAKYGGLGSPNVAYTVAFTYEKGKARKRTNALEGITIMEREAFEQSPVLFLKNKGYEQAEIEMKLPKYALFELENGRKRMVASKEAQKANSFLLPEHLVTLLYHAKQYDEISHKESFDYVNEHHKEFSEVFARVLEFAGKYTLAEKNIEKLEKIYKENQTDDLAKLASSFVNLMQFNAMGAPADFKFFDVTIPRKRYTSLTEIWQSTIIHQSITGLYETRIRMGK

SEQ ID NO: 214 - protein, 1328 aa, Enterococcus faecium
MKKEYTIGLDIGTNSVGWSVLTDDYRLVSKKMKVAGNTEKSSTKKNFWGVRLFDEGQTAEARRSKRTARRRLARRRQRILELQKIFAPEILKIDEHFFARLNESFLVLDEKKQSRHPVFATIKQEKSYHQTYPTIYHLRQALADSSEKADIRLVYLAMAHLLKYRGHFLIEGELNTENSSVTETFRQFLSTYNQQFSEADKLDEAVDCSFVFTEKMSKTKKAETLLKYFPHEKSNGYLSQFIKLMVGNQGNFKNVFGLEEAKLQFSKETYEEDLEELLEKIGDDYIDLFVQAKNVYDAVLLSEILSDSTKNTRAKLSAGMIRRYDAHKEDLVLLKRFVKENLPKKYRAFFGDNSVNGYAGYIEGHATQEDFYKFVKKELTGIRGSEVFLTKIEQENFLRKQRTFDNGVIPHQIHLTELRAIIANQKKHYPFLKEEQEKLESLLTFKIPYYVGPLAKKQENSPFAWLIRKSEEKIKPWNLPEIVDMEGSAVRFIERMINTDMYIPHNKVLPKNSLLYQKFSIYNELTKVRYQDERGQMNYFSSIEKKEIFHELFEKNRKVTKKDLQEFLYLKYDIKHAELSGIEKAFNASYTTYHDFLTMSENKQWLEDPELASMFEEIIKTLTVFEDREMIKTRLSHHEATLGKHIIKKLTKKHYTGWGRLSKELIQGIRDKQSNKTILDYLIDDDFPHHRNRNFMQLINDDSLSFKKEIKKAQMITDTENLEEIVKELTGSPAIKKGILQSLKIVDEIVGIMGYEPANIVVEMARENQTTGRGLKSSRPRLKALEESLKDFGSQLLKEYPTDNSSLQKDRLYLYYLQNGRDMYTGAPLDIHRLSDYDIDHIIPRSFTTDNSIDNKVLVSSKENRLKKDDVPSEKVVKKMRSFWYDLYSSKLISKRKLDNLTKIKLTEEDKAGFIKRQLVETRQITKHVAGILHHRFNKAEDTNEPIRKVRIITLKSALVSQFRNRFGIYKVREINEYHHAHDAYLNGVVALALLKKYPQLAPEFVYGEYLKFNAHKANKATVKKEFYSNIMKFFESDTPVCDENGEIFWDKSKSIAQVKKVINHHHMNIVKKTEIQKGGFSEETVEPKKDSSKLLPRKNNWDPAKYGGLGSPNVAYTVAFTYEKGKARKRTNALEGITIMEREAFEQSPVLFLKNKGYEQAEIEMKLPKYALFELENGRKRMVASKEAQKANSFLLPEHLVTLLYHAKQYDEISHKESFDYVNEHHKEFSEVFARVLEFAGKYTLAEKNIEKLEKIYKENQTDDLAKLASSFVNLMQFNAMGAPADFKFFDVTIPRKRYTSLTEIWQSTIIHQSITGLYETRIRMGK

SEQ ID NO: 215 - protein, 1329 aa, Enterococcus faecium
MKKEYTIGLDIGTNSVGWSVLTDDYRLVSKKMKVAGNTEKSSTKKNFWGVRLFDEGQTAEARRSKRTARRRLARRRQRILELQKIFAPEILKIDEHFFARLNESFLVLDEKKQSRHPVFATIKQEKSYHQTYPTIYHLRQALADSSEKADIRLVYLAMAHLLKYRGHFLIEGELNTENSSVTETFRQFLSTYNQQFSEADKLDEAVDCSFVFTEKMSKTKKAETLLKYFPHEKSNGYLSQFIKLMVGNQGNFKNVFGLEEEAKLQFSKETYEEDLEELLEKIGDDYIDLFVQAKNVYDAVLLSEILSDSTKNTRAKLSAGMIRRYDAHKEDLVLLKRFVKENLPKKYRAFFGDNSVNGYAGYIEGHATQEDFYKFVKKELTGIRGSEVFLTKIEQENFLRKQRTFDNGVIPHQIHLTELRAIIANQKKHYPFLKEEQEKLESLLTFKIPYYVGPLAKKQENSPFAWLIRKSEEKIKPWNLPEIVDMEGSAVRFIERMINTDMYMPHNKVLPKNSLLYQKFSIYNELTKVRYQDERGQMNYFSSIEKKEIFHELFEKNRKVTKKDLQEFLYLKYDIKHAELSGIEKAFNASYTTYHDFLTMSENKQWLEDPELASMFEEIIKTLTVFEDREMIKTRLSHHEATLGKHIIKKLTKKHYTGWGRLSKELIQGIRDKQSNKTILDYLIDDDFPHHRNRNFMQLINDDSLSFKKEIKKAQMITDTENLEEIVKELTGSPAIKKGILQSLKIVDEIVGIMGYEPANIVVEMARENQTTGRGLKSSRPRLKALEESLKDFGSQLLKEYPTDNSSLQKDRLYLYYLQNGRDMYTGAPLDIHRLSDYDIDHIIPRSFTTDNSIDNKVLVSSKENRLKKDDVPSEKVVKKMRSFWYDLYSSKLISKRKLDNLTKIKLTEEDKAGFIKRQLVETRQITKHVAGILHHRFNKAEDTNEPIRKVRIITLKSALVSQFRNRFGIYKVREINEYHHAHDAYLNGVVALALLKKYPQLAPEFVYGEYLKFNAHKANKATVKKEFYSNIMKFFESDTPVCDENGEIFWDKSKSIAQVKKVINHHHMNIVKKTEIQKGGFSKETVEPKKDSSKLLPRKNNWDPAKYGGLGSPNVAYTVAFTYEKGKARKRTNALEGITIMEREAFEQSPVLFLKNKGYEQAEIEMKLPKYALFELENGRKRMVASKEAQKANSFLLPEHLVTLLYHAKQYDEISHKESFDYVNEHHKEFSEVFARVLEFAGKYTLAEKNIEKLEKIYKENQTDDLAKLASSFVNLMQFNAMGAPADFKFFDVTIPRKRYTSLTEIWQSTIIHQSITGLYETRIRMGK

SEQ ID NO: 216 - protein, 1329 aa, Enterococcus faecium
MKKEYTIGLDIGTNSVGWSVLTDDYRLVSKKMKVAGNTEKSSTKKNFWGVRLFDEGQTAEARRSKRTARRRLARRRQRILELQKIFAPEILKIDEHFFARLNESFLVLDEKKQSRHPVFATIKQEKSYHQTYPTIYHLRQALADSSEKADIRLVYLAMAHLLKYRGHFLIEGELNTENSSVTETFRQFLSTYNQQFSEADKLDEAVDCSFVFTEKMSKTKKAETLLKYFPHEKSNGYLSQFIKLMVGNQGNFKNVFGLEEEAKLQFSKETYEEDLEELLEKIGDDYIDLFVQAKNVYDAVLLSEILSDSTKNTRAKLSAGMIRRYDAHKEDLVLLKRFVKENLPKKYRAFFGDNSVNGYAGYIEGHATQEDFYKFVKKELTGIRGSEVFLTKIEQENFLRKQRTFDNGVIPHQIHLTELRAIIANQKKHYPFLKEEQEKLESLLTFKIPYYVGPLAKKQENSPFAWLIRKSEEKIKPWNLPEIVDMEGSAVRFIERMINTDMYIPHNKVLPKNSLLYQKFSIYNELTKVRYQDERGQMNYFSSIEKKEIFHELFEKNRKVTKKDLQEFLYLKYDIKHAELSGIEKAFNASYTTYHDFLTMSENKQWLEDPELASMFEEIIKTLTVFEDREMIKTRLSHHEATLGKHIIKKLTKKHYTGWGRLSKELIQGIRDKQSNKTILDYLIDDDFPHHRNRNCMQLINDDSLSFKKEIKKAQMITDTENLEEIVKELTGSPAIKKGILQSLKIVDEIVGIMGYEPANIVVEMARENQTTGRGLKSSRPRLKALEESLKDFGSQLLKEYPTDNSSLQKDRLYLYYLQNGRDMYTGAPLDIHRLSDYDIDHIIPRSFTTDNSIDNKVLVSSKENRLKKDDVPSEKVVKKMRSFWYDLYSSKLISKRKLDNLTKIKLTEEDKAGFIKRQLVETRQITKHVAGILHHRFNKAEDTNEPIRKVRIITLKSALVSQFRNRFGIYKVREINEYHHAHDAYLNGVVALALLKKYPQLAPEFVYGEYLKFNAHKANKATVKKEFYSNIMKFFESDTPVCDENGEIFWDKSKSIAQVKKVINHHHMNIVKKTEIQKGGFSKETVEPKKDSSKLLPRKNNWDPTKYGGLGSPNVAYTVAFTYEKGKARKRTNALEGITIMEREAFEQSPVLFLKNKGYEQAEIEMKLPKYALFELENGRKRMVASKEAQKANSFLLPEHLVTLLYHAKQYDEISHKESFDYVNEHHKEFSEVFARVLEFAGKYTLAEKNIEKLEKIYKENQTDDLAKLASSFVNLMQFNAMGAPADFKFFDVTIPRKRYTSLTEIWQSTIIHQSITGLYETRIRMGK

SEQ ID NO: 217 - protein, 1329 aa, Enterococcus faecium
MTKDYTIGLDIGTNSVGWAVLTDDYQLMKRKMSVHGNTEKKKIKKNFWGARLFDEGQTAEFRRTKRTNRRRLARRKYRLSKLQDLFAEELCKQDDCFFVRLEESFLVPEEKQYKPASIFPTLEEEKEYYQKYPTIYHLRQKLVDSTEKEDLRLVYLALAHLLKYRGHFLFEGDLDTENTSIEESFRVFLEQYSKQSDQPLIVHQPVLTILTDKLSKTKKVEEILKYYPTEKINSFFAQCLKLIVGNQANFKRIFDLEAEVKLQFSKETYEEDLESLLEKIGDEYLDIFLQAKKVHDAILLSEIISSTVKHTKAKLSSGMVERYERHKADLAKFKQFVKENVPQKATVFFKDTTKNGYAGYIKGKTTQEEFYKFVKKELSGVVGSEPFLEKIDQETFLLKQRTYTNGVIPHQVHLIELKAIIDQQKQHYPFLEEAGPKIIALFKFRIPYYVGPLAKEQEASSFAWIERKTAEKINPWNFSEVVDIEKSAMRFIQRMTKQDTYLPTEKVLPKNSLLYQKYMIFNELTKVSYKDERGVKQYFSGDEKQQIFKQLFQKERGKITVKKLQNFLYTHYHIENAQIFGIEKAFNASYSTYHDFMKLAKTNEWLEQPEMEPIFEDIVKILTIFEDRQMIKHQLSKYQEVFGEKLLKEFARKHYTGWGRFSAKLIHGIRDRKTNKTILDYLIDDDVPANRNRNLMQLINDEHLSFKEEIAKATVFSKHKSLVDVIQDLPGSPAIKKGIWQSLKIVEELIAIIGYKPKNIVIEMARENQKTHRTSPRLKALENGLKQIGSTLLKEQPTDNKALQKERLYLYYLQNGRDMYTGEPLEIENLHQYEVDHIIPRSFIVDNSIDDKVLVASKQNQKKRDDVPKKQIVNEQRIFWNQLKEAKLISTKKYAYLTKIELTPEDKARFIQRQLVETRQITKHVANILHQSFNQEEEGTDCDGVQIITLKATLTSQFRQTFGLYKVREINPHHHAHDAYLNGFIANVLLKRYPKLAPEFVYGKYVKYSLARENKATAKKEFYSNILKFLESDEPFCDENGEIYWEKSHHLPRIKKVLSSHQVNVVKKVEQQKGGFYKETVNSKEKPDKLIERKNNWDVTKYGGFGSPVIAYAIAFVYAKGKTQKKTRAIEGITIMEQAAFEKDPTTFLKEKGFPQVTEFIKLPKYTLFEFDNGRRRFLASKESQKGNPFILSDQLVTLLYHAQHYDKITYQESFDYVNTHLSDFSAILTEVLAFAEKYTLADKNIERIQELYEENKYGETSMIAQSFLQLLQFNAIGAPADFKFFGVTIPRKRYTSLTEIWDATIIYQSVTGLYETRIRMGDLWAGEQ

SEQ ID NO: 218 - protein, 1329 aa, Enterococcus faecium
MKKEYTIGLDIGTNSVGWSVLTDDYRLVSKKMKVAGNTEKSSTKKNFWGVRLFDEGQTAEARRSKRTARRRLARRRQRILELQKIFAPEILKIDEHFFARLNESFLVLDEKKQSRHPVFATIKQEKSYHQTYPTIYHLRQALADSSEKADIRLVYLAMAHLLKYRGHFLIEGELNTENSSVTETFRQFLSTYNQQFSEADKLDEAVDCSFVFTEKMSKTKKAETLLKYFPHEKSNGYLSQFIKLMVGNQGNFKNVFGLEEEAKLQFSKETYEEDLEELLEKIGDDYIDLFVQAKNVYDAVLLSEILSDSTKNTRAKLSAGMIRRYDAHKEDLVLLKRFVKENLPKKYRAFFGDNSVNGYAGYIEGHATQEDFYKFVKKELTGIRGSEVFLTKIEQENFLRKQRTFDNGVIPHQIHLTELRAIIANQKKHYPFLKEEQEKLESLLTFKIPYYVGPLAKKQENSPFAWLIRKSEEKIKPWNLPEIVDMEGSAVRFIERMINTDMYMPHNKVLPKNSLLYQKFSIYNELTKVRYQDERGQMNYFSSIEKKEIFHELFEKNRKVTKKDLQEFLYLKYDIKHAELSGIEKAFNASYTTYHDFLTMSENKQWLEDPELASMFEEIIKTLTVFEDREMIKTRLSHHEATLGKHIIKKLTKKHYTGWGRLSKELIQGIRDKQSNKTILDYLIDDDFPHHRNRNFMQLINDDSLSFKKEIKKAQMITDTENLEEIVKELTGSPAIKKGILQSLKIVDEIVGIMGYEPANIVVEMARENQTTGRGLKSSRPRLKALEESLKDFGSQLLKEYPTDNSSLQKDRLYLYYLQNGRDMYTGAPLDIHRLSDYDIDHIIPRSFTTDNSIDNKVLVSSKENRLKKDDVPSEKVVKKMRSFWYDLYSSKLISKRKLDNLTKIKLTEEDKAGFIKRQLVETRQITKHVAGILHHRFNKAEDTNEPIRKVRIITLKSALVSQFRNRFGIYKVREINEYHHAHDAYLNGVIALALLKKYPQLAPEFVYGEYLKFNAHKANKATVKKEFYSNIMKFFESDTPVCDENGEIFWDKSKSIAQVKKVINHHHMNIVKKTEIQKGGFSKETVEPKKDSSKLLPRKNNWDPAKYGGLGSPNVAYTVAFTYEKGKARKRTNALEGITIMEREAFEQSPVLFLKNKGYEQAEIEMKLPKYALFELENGRKRMVASKEAQKANSFLLPEHLVTLLYHAKQYDEISHKESFDYVNEHHKEFSEVFARVLEFAGKYTLAEKNIEKLEKIYKENQTDDLAKLASSFVNLMQFNAMGAPADFKFFDVTIPRKRYTSLTEIWQSTIIHQSITGLYETRIRMGK

SEQ ID NO: 219 - protein, 1329 aa, Enterococcus hirae
MTKDYTIGLDIGTNSVGWAVLTDDYQLMKRKMSVHGNTEKKKIKKNFWGARLFDEGQTAEFRRTKRTNRRRLARRKYRLSKLQDLFAEELCKQDDCFFVRLEESFLVPEEKQYKPASIFPTLEEEKEYYQKYPTIYHLRQKLVDSTEKGDLRLVYLALAHLLKYRGHFLFEGDLDTENTSIEESFRVFLEQYGKQSDQPLIVHQPVLTILTDKLSKTKKVEEILKYYPTEKINSFFAQCLKLIVGNQANFKRIFDLEAEVKLQFSKETYEEDLESLLEKIGDEYLDIFLQAKKVHDAILLSEIISSTVKHTQAKLSSGMVERYERHKADLAKFKQFVKENVPQKATVFFKDTTKNGYAGYIKGKTTQEEFYKFVKKELSGVVGSEPFLEKIDQETFLLKQRTYTNGVIPHQVHLIELKAIIDQQKQHYPFLEEAGPKIIALFKFRIPYYVGPLAKEQEASSFAWIERKTAEKINPWNFSEVVDIEKSAMRFIQRMTKQDTYLPTEKVLPKNSLFYQKYMIFNELTKVSYKDERGVKQYFSGDEKQQIFKQLFQKERGKITVKKLQNFLYTHYHIENAQIFGIEKAFNASYSTYHDFMKLAKTNEWLEQPEMEPIFEDIVKILTIFEDRQMIKHQLSKYQEVFGEKLLKEFARKHYTGWGRFSAKLIHGIRDRKTNKTILDYLIDDDVPANRNRNLMQLINDEHLSFKEEIAKATVFSKHKSLVDVIQDLPGSPAIKKGIWQSLKIVEELIAIIGYKPKNIVIEMARENQKTHRTKPRLKALENGLKQIGSTLLKEQPTDNKALQKERLYLYYLQNGRDMYTGEPLEIENLHQYEVDHIIPRSFIVDNSIDNKVLVASKQNQKKRDDVPKKQIVNEQRIFWNQLKEAKLISPKKYAYLTKIELTPEDKARFIQRQLVETRQITKHVANILHQSFNQEEEGTDCDGVQIITLKATLTSQFRQTFGLYKVREINPHHHAHDAYLNGFIANVLLKRYPKLAPEFVYGKYVKYSLARENKATAKKEFYSNILKFLESDEPFCDENGEIYWEKSHHLPRIKKVLSSHQVNVVKKVEQQKGGFYKETVNSKEKPDKLIERKNNWDVTKYGGFGSPVIAYAIAFVYAKGKTQKKTKAIEGITIMEQAAFEKDPTTFLKDKGFPQVTEFIKLPKYTLFEFDNGRRRFLASKESQKGNPFILSDQLVTLLYHAQHYDKITYQESFDYVNTHLSDFSAILTEVLAFAEKYTLADKNIERIQELYEENKYGEISMIAQSFLQLLQFNAIGAPADFKFFGVTIPRKRYTSLTEIWDATIIYQSVTGLYETRIRMGDLWAGEQ

SEQ ID NO: 220 - protein, 1329 aa, Enterococcus hirae
MTKDYTIGLDIGTNSVGWAVLTDDYQLMKRKMSVHGNTEKKKIKKNFWGARLFDEGQTAEFRRTKRTNRRRLARRKYRLSKLQDLFAEELCKQDDCFFVRLEESFLVPEEKQYKPASIFPTLEEEKEYYQKYPTIYHLRQKLVDSTEKEDLRLVYLALAHLLKYRGHFLFEGDLDTENTSIEESFRVFLEQYSKQSDQPLIVHQPVLTILTDKLSKTKKVEEILKYYPTEKINSFFAQCLKLIVGNQANFKRIFDLEAEVKLQFSKETYEEDLESLLEKIGDEYLDIFLQAKKVHDAILLSEIISSTVKHTKAKLSSGMVERYERHKADLAKFKQFVKENVPQKATVFFKDTTKNGYAGYIKGKTTQEEFYKFVKKELSGVVGSEPFLEKIDQETFLLKQRTYTNGVIPHQVHLIELKAIIDQQKQHYPFLEEAGPKIIALFKFRIPYYVGPLAKEQEASSFAWIERKTAEKINPWNFSEVVDIEKSAMRFIQRMTKQDTYLPTEKVLPKNSLLYQKYMIFNELTKVSYKDERGVKQYFSGDEKQQIFKQLFQKERGKITVKKLQNFLYTHYHIENAQIFGIEKAFNASYSTYHDFMKLAKTNEWLEQPEMEPIFEDIVKILTIFEDRQMIKHQLSKYQEVFGEKLLKEFARKHYTGWGRFSAKLIHGIRDRKTNKTILDYLIDDDVPANRNRNLMQLINDEHLSFKEEIAKATVFSKHKSLVDVIQDLPGSPAIKKGIWQSLKIVEELIAIIGYKPKNIVIEMARENQKTHRTSPRLKALENGLKQIGSTLLKEQPTDNKALQKERLYLYYLQNGRDMYTGEPLEIENLHQYEVDHIIPRSFIVDNSIDNKVLVASKQNQKKRDDVPKKQIVNEQRIFWNQLKEAKLISPKKYAYLTKIELTPEDKARFIQRQLVETRQITKHVANILHQSFNQEEEGTDCDGVQIITLKATLTSQFRQTFGLYKVREINPHHHAHDAYLNGFIANVLLKRYPKLAPEFVYGKYVKYSLARENKATAKKEFYSNILKFLESDEPFCDENGEIYWEKSHHLPRIKKVLSSHQVNVVKKVEQQKGGFYKETVNSKEKPDKLIERKNNWDVTKYGGFGSPVIAYAIAFVYAKGKTQKKTRAIEGITIMEQAAFEKDPTTFLKEKGFPQVTEFIKLPKYTLFEFDNGRRRFLASKESQKGNPFILSDQLVTLLYHAQHYDKITYQESFDYVNTHLSDFSAILTEVLAFAEKYTLADKNIERIQELYEENKYGETSMIAQSFLQLLQFNAIGAPADFKFFGVTIPRKRYTSLTEIWDATIIYQSVTGLYETRIRMGDLWAGEQ

SEQ ID NO: 221 - protein, 1329 aa, Enterococcus hirae
MTKDYTIGLDIGTNSVGWAVLTDDYQLMKRKMSVHGNTEKKKIKKNFWGARLFDEGQTAEFRRTKRTNRRRLARRKYRLSKLQDLFAEELCKQDDCFFVRLEESFLVPEEKQYKPASIFPTLEEEKEYYQKYPTIYHLRQKLVDSTEKEDLRLVYLALAHLLKYRGHFLFEGDLDTENTSIEESFRVFLEQYGKQSDQPLIVHQPVLTILTDKLSKTKKVEEILKYYPTEKINSFFAQCLKLIVGNQANFKRIFDLEAEVKLQFSKETYEEDLESLLEKIGDEYLDIFLQAKKVHDAILLSEIISSTVKHTQAKLSSGMVERYERHKADLAKFKQFVKENVPQKATVFFKDTTKNGYAGYIKGKTTQEEFYKFVKKELSGVVGSEPFLEKIDQETFLLKQRTYTNGVIPHQVHLIELKAIIDQQKQHYPFLEEAGPKIIALFKFRIPYYVGPLAKEQEASSFAWIERKTAEKINPWNFSEVVDIEKSAMRFIQRMTKQDTYLPTEKVLPKNSLLYQKYMIFNELTKVSYKDERGVKQYFSGDEKQQIFKQLFQKERGKITVKKLQNFLYTHYHIENAQIFGIEKAFNASYSTYHDFMKLAKTNEWLEQPEMEPIFEDIVKILTIFEDRQMIKHQLSKYQEVFGEKLLKEFARKHYTGWGRFSAKLIHGIRDRKTNKTILDYLIDDDVPANRNRNLMQLINDEHLSFKEEIAKATVFSKHKSLVDVIQDLPGSPAIKKGIWQSLKIVEELIAIIGYKPKNIVIEMARENQKTHRTKPRLKALENGLKQIGSTLLKEQPTDNKALQKERLYLYYLQNGRDMYTGEPLEIENLHQYEVDHIIPRSFIVDNSIDNKVLVASKQNQKKRDDVPNKQIVNEQRIFWNQLKEAKLISPKKYAYLTKIELTPEDKARFIQRQLVETRQITKHVANILHQSFNQEEEGTDCDGVQIITLKATLTSQFRQTFGLYKVREINPHHHAHDAYLNGFIANVLLKRYPKLAPEFVYGKYVKYSLARENKATAKKEFYSNILKFLESDEPFCDENGEIYWEKSHHLPRIKKVLSSHQVNVVKKVEQQKGGFYKETVNSKEKPDKLIERKNNWDVTKYGGFGSPVIAYAIAFVYAKGKTQKKTRAIEGITIMEQAAFEKDPTTFLKDKGFPHVTEFIKLPKYTLFEFDNGRRRFLASKESQKGNPFILSDQLVTLLYHAQHYDKITYQESFDYVNTHLSDFSAILTEVLAFAEKYTLADKNIERIQELYEENKYGEISMIAQSFLQLLQFNAIGAPADFKFFGVTIPRKRYTSLTEIWDATIIYQSVTGLYETRIRMGDLWAGEQ

SEQ ID NO: 222 - protein, 1324 aa, Enterococcus italicus
MKNDYTIGLDIGTNSVGYSVVTDDYKVISKKMNVFGNTEKKSIKKNFWGVRLFESGQTAQEARMKRTSRRRIARRKNRICYLQEIFQPEMNHLDNNFFYRLNESFLVADDAKYDKHPIFGTLDEEIHFHEQFPTIYHLRKYLADGDEKADLRLVYLAIAHIIKFRGNFLIEGELNTENNSVIELSKVFVQLYNQTLSELEFIDESIDFSEVLTQQLSKSERADNVLKLFPDEKGTGIFAQFIKLIVGNQGNFKKVFQLEEDQKLQLSTDDYEENIENLLAIIGDEYGDIFVAAQNLYQAILLAGILTSTEKTRAKLSASMIQRYEEHAKDLKLLKRFVKEHIPDKYAEIFNDATKNGYAGYIDGKTKEEEFYKYLKTTLVQKSGYQYFIEKIEQENFLRKQRIYDNGVIPHQVHAEELRAILRKQEKYYSFLKENHEKIEQIFKVRIPYYVGPLAKHNEQSRFAWNIRKSDEPIRPWNMNDVVDENASAVAFIERMTIKDIYLNENVLPRHSLIYEKFTVFNELTKVLYADDRGVFQRFSAEEKEDIFEKLFKSERKVTKKKLENYLRIELSISSPSVKGIEEQFNANFGTYLDLKKFDELHPYLDDEKYQDTLEEVIKVLTVFEDRSMIQNQLEQLPLNLSTKTIKALSRRKYTGWGRLSARLIDGIHDKNSGKTILDYLIDESDSYIVNRNFMQLINDDHLSFKKIIEDSQPYKEQQSAEEIVSELSGSPAIKKGILQSLKIVDELVAIMGYKPKNIVVEMARENQTTGRGKQNSKPRLKGIENGLKEFSDSVLKGSSIDNKQLQNDRLYLYYLQNGKDMYTGHELDIDHLSTYDIDHIIPQSFLTDNSIDNRVLTTSKSNRGKSDNVPSEEVVRKMDRFWRKLLNAKLISERKYTNLTKKELTESDKAGFLKRQLVETRQITKHVATILDSKFNEDSNNRDVQIITLKSALVSEFRKTFNLYKVREINDLHHAHDAYLNAVVALSLLRVYPQLKPEFVYGEYGKNSIHDQNKATIKKQFYSNITRYFASKDIINDDGEILWNKQETIAQVIKTLGMHQVNVVKKVEIQKGGFSKESIQPKGESQKLIRRKQQWNTKKYGGFDSPVVAYAILLSFDKGKRKARSFKIVGITIQDRESFEGNPILYLSKKDYHNPKVEAILPKYSLFEFENGRRRMVASSETQKGNQLIIPGHLMELLYHSKKIINGKNSDSVSYIQNNKEKFREIFEYIVDFSSKYISADANLNKIEKIFENNFHKASEQEIAKSFINLLTFTAMGAPADFEFFGEKIPRKRYVSISEIIDAVFIHQSITGLYETRVRLTEV

SEQ ID NO: 223 - protein, 1323 aa, Enterococcus mundtii
MEKEYTIGLDIGTNSVGWAVLTDDYRLVARKMSIQGDSNRKKIKKNFWGARLFEEGKTAQFRRIKRTNRRRIARRRQRVLALQDIFAEEIHKKDPNFFARLEEGDRVEADKRFAKFPVFATLSEEKNYHRQYPTIYHLRHDLANSKEQADIRLVYLAIAHCLKYRGHFLFEGELDTENTSVTENYQQFLQAYQQFFPEPIGDLDDAVPILTERLSKAKRVEKVLAYYPSEKSTGNFAQFLKLMVGNQANFKKTFDLEEEMKLNFTRDCYEEDLNELLEKTSDDYAELFLKAKGVYDAILLSQILSKSDDETKAKLSANMKLRFEEHQRDLKQLKELVRRDLPKKYDDFFKNRSKNGYAGYVKGKATQEDFYKFLRTELAGLEESQSIMEKIDLEIYLLKQRTFANGVIPHQIHLVEMREIMDRQKRFYPFLKGAQGKIEKLLTFRIPYYVGPLAQEGQSPFAWIKRKSPSQITPWNFAEVVDKENSAIEFIERMTNQDTYLPKEKVLPKQSLIYQRFMIFNELTKVSYTDERGKSHYFSSEQKRKIFNELFKQHPRVTEKQLRKFLELNEQIDSTEIKGIETSFNASYSTYHDLLKLSTLLDDPDMTTMFEEIIKILTIFEDREMIREQLKPYETVLGLPAIKKLAKKHYTGWGRLSEKMIQGMREKQSRKTILDYLIDDDFPCNRNRNFMQLINDDHLSFKETIANELIMSDSNVLLDQVKAIPGSPAVKKGIWQSIKIVEEIIGIIGKAPKNIVIEMARENQRTSRSRPRLKALEEALKNIDSPLLKDYPTDNQALQKDRLYLYYLQNGKDMYTGEPLEIHRLSEYDIDHIIPRSFIVDNSLDNKVLVSSKVNRGKLDNAPDPLVVKRMRSHWEKLHQAKLISDKKLANLTKQNLTEADKARFIQRQLVETRQITKHVANLLHQHFNLPEEVSATEKTSIITLKSTLTSQFRQMFDIYKVREINHHHHAHDAYLNGVVAMTLLKKYPKLAPEFVYGSYIKGDINQINKATAKKEFYSNIMKFFESEEIICDEQGEVIWNKKRDLSTIKKTIGAHQVNIVKKVEKQKGGFYKETINSKANPEKLIPRKASLDPLKYGGYGSPLVAYTVIFIFEKGKQKKVTKGIEGITVMEQLRFEQDPREFLKTKGYEGVKQWLILPKYILFEAQGGYRRMIASQETQKANSLILPENLVTLLYHARHYDEINHKVSFDYVNAHKEGFNDIFDFISDFGVRYILAPQHLEKIKVAYEKNKEVDLKEMIDAILSLLKFTLFGASVEFKFFDIKILKRYKSLTDIWEATIIYQSVTGLYERRVEVRKLWDGER

SEQ ID NO: 224 - protein, 1330 aa, Enterococcus phoeniculicola
MKKEYTIGLDIGTNSVGWAVLTENYDLVKKKMKVYGNTETKYLKKNLWGVRLFDEGETAADRRLKRTTRRRYSRRRNRICRLQDLFTEEMNQVDANFFHRLQESFLVPDEKEFERHAIFGKMEEEVSYYREFPTIYHLRKHLADTSEQADLRLVYLALAHIVKYRGHFLIEGELNTENSSVSETFRTFIQVYNQIFRENEPLAVPDNIEELFSEKVSRARKVEAILSVYSEEKSTGTLAQFLKLMVGNQGRFKKTFDLEEDGIIQIPKEEYEEELETLLAIIGDEYAEIFSATKSVYDAVALSGILSVTDGDTKAKLSASMVERYEAHQKDLVQFKQFIRKELPEMYAPIFRDNSVSGYAGYVENSVTQAEFYKYIKKAIEKVPGAEYFLEKIEQETFLDKQRTFNNGVIPHQIHLEELEAIIQKQATYYPFLADNKEEMKQLVTFRIPYYVGPLADGNSPFAWLERISSEPIRPGNLAEVVDIKKSATKFIERMTNFDTYLPTEKVLPKHSMIYEKYMVYNELTKVSYVDERGMNQRFSGEEKKQIVEELFKQSRKVTKKLLEKFLSNEFGLVDVAIKGIETSFNAGYGTYHDFLKIGITREQLDKEENSETLEEIVKILTVFEDRKMIREQLKKYTYLFDEEVLKKLERRHYTGWGRLSAKLLIGIKEKRTHKTILDYLIDDGGKQPINRNLMQLINDSDLSFKSEIAEAQSDMNTEDLHEVVQNLAGSPAIKKGILQSLKIVDELVDIMGSLPKNIVVEMARENQTTSRGRTNSNPRMKALEEAMRNLRSNLLKEYPTDNQALQNDRLYLYYLQNGKDMYTGLDLSLHNLSSYDIDHIVPQSFTTDNSLDNRVLVSSKENRGKKDDVPSKEVVQKNITLWETLKNSNLISQKKYDNLTKGLRGGLTEDDRAHFIKRQLVETRQITKHVARILDQRFNSQKDEEGKTIRAVRVVTLKSSLTSQFRKQFAIHKVREINDYHHGHDAYLNGVVANSLLRVYPQLQPEFVYGDYPKFNAYKANKATAKKQLYTNIMKFFAEDAVIIDENGEILWDKKNIATVKKVMSYPQMNIVKKPEIQTGSFSKETIKPKGDSDKLISRKTNWSPKLYGGFDSPQVAYSVIITYEKGKKKVRAKAIVGITIMEQSLFKKDPVSLLEEKGYANPEVLIHLPKYTLYELENGRRRLLASANEAQKGNQLVLPASLVTLLYHAKQVDEDSGKSEEYVREHRAEFAEILNYVQAFSETKILANKNLQTILKLYEENKEADIKEIAESFVNLMKFSAYGAPMDFKFFGKTIPRSRYTSVGELLSATIINQSITGLYETRRKLVD

SEQ ID NO: 225 - protein, 1327 aa, Enterococcus sp. AM1
MGKEYTIGLDIGTNSVGWAVLQEDLDLVRRKMKVYGNTEKNYLKKNFWGVDLFDEGMTAKDTRLKRTTRRRYFRRRQRISYLQTFFQEEMNRIDPNFFNRLDESFLIEEDKLSERHPIFGTIEEEVAYHKNYATIYHLRKELADAEEKADLRLVYLALAHIIKYRGHFLIEGRLSTENTSTEETFKTFLQKYNQTFNPVDETISIGSIFADKVSRAKKAEGVLALFPDEKRNGTFDQFLKMIVGNQGNFKKTFELEEDAKLQFSKEEYDESLEALLGEIGDEYADVFEAAKNVYNAVELSGILTVTDNSTKAKLSASMIKRYEDHKTDLKLFKEFIRKNLPEKYHEIFNDKNTDGYAGYIDNSTSQEKFYKYITNLIEKIDGAEYFLKKIENEDFLRKQRTFDNGIIPHQIHLEELKAILHHQAMYYPFLQEKFSNFVDLLTFRIPYYVGPLANGNSRFSWLSRKSDEPIRPWNLAEVVDLSKSAELFIERMTNFDLYLPSEKVLPKHSMLYEKYTVYNELTKVTYKDEQGKVQNFSSEEKERIFIDLFKQHRKVTKKDLSNFLRNEYNLDDVIIDGIENKFNASFNTYHDFLKLKIDPKVLDDPANEPMFEEIVKILTIFEDRKMLREQLSKFSDRLSEKTIKDLERRHYTGWGRLSAKLINGIHDKQSNKTILDYLIDDAPKKNINRNFMQLINDNRLTFKEEIEKEQLKANSEESLIEIVQNLAGSPAIKKGIFQSLKIVDELVEIMGYAPTNIVVEMARENQTTANGRRNSRPRLKNLEKAIDDLDSEILKKHPVDNKALQKDRLYLYYLQNGKDMYTNEELDIHKLSTYDIDHIIPQSFIVDNSLDNRVLVSSSKNRGKLDDVPSKEVVKKMRAFWESLYRSGLISKKKFDNLVKAESGGLSEDDKAGFIHRQLVETRQITKNVARILHQRFNSEKDEEGNLIRKVRIITLKSALTSQFRKNYGIYKIREINDYHHAHDAYLNGVVATALLKIYPQLEPEFVYGEFHRFNAFKENKATAKKQFYSNLMEFSKSDKVIIDENGEILWNQKKIVTVKKVMNYRQMNIVKKVEIQKGGFSKESILPKGDSDKLISRKKEWDTTKYGGFDSPNVAYSVVIRYEKGKTRKLVKTIVGITIMERAAFEKNEREFLKNKGYQNPQICMKLPKYSLYEFDDGRRRLLASAKEAQKGNQMVLPAHLVTFLYHAKHCNEKPDSLKYVTEHQSGFSEIMAHVKDFAEKYTLVDKNLEKILSLYAKNMDSEVKEIAQSFVDLMQLNAFGAPADFKFFGETIPRKRYTSVNELLEATIINQSITGLYETRRRLGD

SEQ ID NO: 226 - protein, 1332 aa, Enterococcus villorum
MNKAYTLGLDIGTNSVGWAVVTDDYRLMAKKMPVHSKMEKKKIKKNFWGARLFDEGQTAEERRNKRATRRRLRRRKYRILELQKIFSEEILKKDSHFFARLDESFLIPEDKQYARFPIFPTLLEEKAYYQNYPTIYHLRQKLADSTEKADIRLVYLALAHMIKYRGHFLFEGELDTENTSVEETFKEFIDIYNEQFEEGIIFYKDIPLILTDKLSKSKKVEKILQYYPKEKTTGCLAQFLKLIVGNQGNFKQAFHLDEEVKIQISKETYEEDLEKLLRKSNEEMIDVFLQVKKVYDAILLSDILSTKMKDTKAKLSAGMIERYQNHKKDLEELKQFVRAHLHEKVTVFFKDSSKDGYAGYIDGKTTQADFYKFLKKELTGVPGSEPMLAKIDQENFLLKQRTPTNGVIPHQVHLTEFKAIIDQQKQYYPFLEKSKEKMIQLLTFRIPYYVGPLAQDKETSSFAWLERKTTEKIKPWNAKDVIDYGASATKFIQRMINYDTYLPTEKVLPKYSMLYQKYTIFNELTKVAYKDDRGIKHQFSSEEKLRIFQELFKKQRRVTKKKLQHFLSANYNIEDAEILGVDKVFNSSYATYHDFLELAKPYELLEQPEMEEMFEDIVKIITIFEDREMVRTQLKKYQRILGEEIFKKLVKKKYTGWGRLSKRLINGIRDQKTNKTILDYLIDDDFPYNRNRNFMQLINDDHLSFKEEIAKELTLSDKQSLLEVVEAIPGSPAIKKGIWQTLKIVEELIAIIGYKPKNIVIEMARENQTTTGGKNRSKPRLKSLEEALKNFDSQLLKERPVDNQSLQKDRLYLYYLQNGKDMYTGESLDIDRLSEYDIDHIIPRSFIVDHSLDNKVLVSSKENRLKKDDVPDSKVVKRMKAYWEKLLRANLISERKFSYLTKLELTDDDKARFIQRQLVETRQITKHVAAILHQYFNQTQELEKEKDIRIITLKSSLVSQFRQVFGIHKVREINHHHHAHDAYLNAVVALALLKKYPRLAPEFVYGSFAKFHLVKENKATAKKEFYSNILKFFEKEEQFCDENGEIFWDKRKHIQQIKKVISSHQVNIVKKVEVQTGSFYKETVNTKEKPDKLIKRKNNWDVTKYGGFGSPVVAYAVVFTYEKGKNHKKAKAIEGITIMEQALFEKDPISFLIEKGYSNVNQFIKLPKYTLFELANGQRRMLASQELQKANSFILPEKLVTLLYHANHYDEIAYKDSYDYVNEHFSNFQDILDKVIIFAEKYTSAPQKLNQIIATYEKNQEADRKIMAHSFVNLMQFNALGAPADFKFFDTTITRKRYTSLTEIWQSTIIYQSVTGLYETRRRMADLWDGVQ

SEQ ID NO: 227 - protein, 1359 aa, Artificial Sequence
  Synthetic polypeptide
ADKKYSIGLDIGTNSVGWAVITDEYKVPSKKFKVLGNTDRHSIKKNLIGALLFDSGETAEATRLKRTARRRYTRRKNRICYLQEIFSNEMAKVDDSFFHRLEESFLVEEDKKHERHPIFGNIVDEVAYHEKYPTIYHLRKKLVDSTDKADLRLIYLALAHMIKFRGHFLIEGDLNPDNSDVDKLFIQLVQTYNQLFEENINASGVDAKAILSARLSKSRRLENLIAQLPGEKKNGLFGNLIALSLGLTPNFKSNFDLAEDAKLQLSKDTYDDDLDNLLAQIGDQYADLFLAAKNLSDAILLSDILRVNTEITKAPLSASMIKRYDEHHQDLTLLKALVRQQLPEKYKEIFFDQSKNGYAGYIDGGASQEEFYKFIKPILEKMDGTEELLVKLNREDLLRKQRTFDNGSIPHQIHLGELHAILRRQEDFYPFLKDNREKIEKILTFRIPYYVGPLARGNSRFAWMTRKSEETITPWNFEEVVDKGASAQSFIERMTNFDKNLPNEKVLPKHSLLYEYFTVYNELTKVKYVTEGMRKPAFLSGEQKKAIVDLLFKTNRKVTVKQLKEDYFKKIECFDSVEISGVEDRFNASLGTYHDLLKIIKDKDFLDNEENEDILEDIVLTLTLFEDREMIEERLKTYAHLFDDKVMKQLKRRRYTGWGRLSRKLINGIRDKQSGKTILDFLKDGFANRNFMQLIHDDSLTFKEDIQKAQVSGQGDSLHEHIANLAGSPAIKKGILQTVKVVDELVKVMGRHKPENIVIEMARENQTTQKGQKNSRERMKRIEEGIKELGSQILKEHPVENTQLQNEKLYLYYLQNGRDMYVDQELDINRLSDYDVDHIVPQSFLKDDSIDNKVLTRSDKNRGKSDNVPSEEVVKKMKNYWRQLLNAKLITQRKFDNLTKAERGGLSELDKAGFIKRQLVETRQITKHVAQILDSRMNTKYDENDKLIREVKVITLKSKLVSDFRKDFQFYKVREINNYHHAHDAYLNAVVGTALIKKYPKLESEFVYGDYKVYDVSEQEIGKATAKYFFYSNIMNFFKTEITLANGEIRKRPLIETNGETGEIVWDKGRDFATVRKVLSMPQVNIVKKTEVQTGGFSKESILPKRNSDKLIARKKDWDPKKYGGFDSPTVAYSVLVVAKVEKGKSKKLKSVKELLGITIMERSSFEKNPIDFLEAKGYKEVKKDLIIKLPKYSLFELENGRKRMLASGELQKGNELALPSKYVNFLYLASHYEKLKGSPEDNEQKQLFVEQHKHYLDEIIEQISEFSKRVILADANLDKVLSAYNKHRDKPIREQAENIIHLFTLTNLGAPAAFKYFDTTIDRKRYTSTKEVLDATLIHQSITGLYETRIDLSQLGGD

SEQ ID NO: 228 - protein, 1300 aa, Kandleria vitulina
NNKIYNIGLDIGDASVGWAVVDEHYNLLKRHGKHMWGSRLFTQANTAVERRSSRSTRRRYNKRRERIRLLRGIMEDMVLDVDPTFFIRLANVSFLDQEDKKDYLKSNYNLFIDKDFNDKTYYDKYPTIYHLRKHLCESKEKEDPRLIYLALHHIVKYRGNFLYEGQKFSMDVSNIEDKMIDVLRQFNEINLFEYVEDKKIDEVLNVLKEPLSKKHKADKAFALFDTTKDNKAAYKELCAALAGNKFNVTKMLKEAELHDEDEKDISFKFSDATFDDAFVEKQPLLGDCVEFIDLLHDIYSWVELQNILGSAHTSEPSISAAMIQRYEDHKNDLKLLKDVIRKYLPKKYFEVFRDEKSKKNNYCNYINHKTPVDEFYKYIKKLIEKIDDPDVKTILNKIELESFMLKQNSRTNGAVPYQMQLDELNKILENQSVYYSDLKDNEDKIRSILTFRIPYYFGPLITKDRQFDWIIKKEGKENERILPWNANEIVDVDKTADEFIKRMRNFCTYFPDEPVLAKNSLTVSKYEVLNEINKLRINDHLIKRDIKDKMLHTLFMDHKSISANAMKKWLVKNQYFSNTDDIKIEGFQKENACSTSLTPWIDFTKIFGEINNSNYELIEKIIYDVTVFEDKKILRRRLKKEYDLDEEKIKKILKLKYSGWSRLSKKLLSGIKTKRTPETVLEVMETNMNLMQVINDEKLGFKKTIDDANSTSVSGKFSYAEVQELAGSPAIKRGIWQALLIVDEIKKIMKHEPAHVYIEFARNEDKERKDSFVNQMLKLYKDFEDEANKHLKGEDAKSKIRSERLKLYYTQMGKCMYTGKSLDIDRLDTYQVDHIVPQSLLKDDSIDNKVLVLSSENQRKLDDLVIPEMIRNKMFGFWNKLYENKIISPKKFYSLIKSEYSDKDKERFINRQIVETRQITKHVAQIISNHYETTKVVTVRADLSHAFRERYHIYKNRDINDFHHAHDAYIATILGTYIGHRFESLDAKYIYGEYQKIFRNKNKDKKDGFILNSMRNLYADKDTGEVVWDPEWISRIKKCFYYKDCFVTKKLEENNGSFFNTVRPNDEHSEKGAKVPVNKLRSNVHKYGGFEGLKYSIVAIKGKKKKGKKIIDVNKLVGIPLMYKNVDDETKINYIKESEGLEEVKIIKEILKNQLIEINGGLFYVTSEIVNARQLILDFNCTRIIDGIYKAMKYKNYSELSQEEIMNVYDIFVEKLKLYYPTYKNIATNFENFENISDEEKCEVIQMLVVMHAGPQNGNITFDDFKLSNRLGRLNCKTISLTTVFIADSPTGMYSKKYKL

SEQ ID NO: 229 - protein, 1301 aa, Kandleria vitulina
NNKIYNIGLDIGDASVGWAVVDEHYNLLKRHGKHMWGSRLFTQANTAVERRSSRSTRRRYNKRRERIRLLREIMEDMVLDVDPTFFIRLANVSFLDQEDKKDYLKSNYNLFIDKDFNDKTYYDKYPTIYHLRKHLCESKEKEDPRLIYLALHHIVKYRGNFLYEGQKFSMDVSNIEDKMIDVLRQFNEINLFEYVEDKKIDEVLNVLKEPLSKKHKAEKAFALFDTTKDNKAAYKELCAALAGNKFNVTKMLKEAELHDEDEKDISFKFSDATFDDAFVEKQPLLGDCVEFIDLLHDIYSWVELQNILGSAHTSEPSISAAMIQRYEDHKNDLKLLKDVIRKYLPKKYFEVFRDEKSKKNNYCNYINHKTPVDEFYKYIKKLIEKIDDPDVKTILNKIELESFMLKQNSRTNGAVPYQMQLDELNKILENQSVYYSDLKDNEDKIRSILTFRIPYYFGPLITKDRQFDWIIKKEGKENERILPWNANEIVDVDKTADEFIKRMRNFCTYFPDEPVMAKNSLTVSKYEVLNEINKLRINDHLIKRDMKDKMLHTLFMDHKSISANAMKKWLVKNQYFSNTDDIKIEGFQKENACSTSLTPWIDFTKIFGKINESNYDFIEKIIYDVTVFEDKKILRRRLKKEYDLDEEKIKKILKLKYSGWSRLSKKLLSGIKTKRTPETVLEVMETNMNLMQVINDEKLGFKKTIDDANSTSVSGKFSYAEVQELAGSPAIKRGIWQALLIVDEIKKIMKHEPAHVYIEFARNEDKERKDSFVNQMLKLYKDFEDEANKHLKGEDAKSKIRSERLKLYYTQMGKCMYTGKSLDIDRLDTYQVDHIVPQSLLKDDSIDNKVLVLSSENQRKLDDLVIPSSIRNKMYGFWEKLFNNKIISPKKFYSLIKTEFNEKDQERFINRQIVETRQITKHVAQIIDNHYENTKVVTVRADLSHQFRERYHIYKNRDINDFHHAHDAYIATILGTYIGHRFESLDAKYIYGEYKRIFRQKNKGKNDGFILNSMRNIYADKDTGEIVWDPNYIDRIKKCFYYKDCFVTKKLEENNGTFFNTVLPNDTNSDKDATVPVNKYRSNVNKYGGFSGVNSFIVAIKGKKKKGKKVIEVNKLTGIPLMYKNADEEIKINYLKQAEDLEEVQIGKEILKNQLIEKDGGLYYIVAEIINAKQLILNESQTKLVCEIYKAMKYKNYDNLDSEKIIDLYRLLINKMELYYPEYRKQLVKKFEDLKVISIEEKCNIIQILATLHCNSSIGKIMYSDFKISTTIGRLNGRTISLDISFIAESPTGMYSKKYKL

SEQ ID NO: 230 - protein, 1304 aa, Lactobacillus animalis
LKKDYSIGLDIGTNSVGHAVVTDDYKVPTKKMKVFGDTSKKTIKKNMLGVLLFNEGQTAADTRLKRGARRRYTRRKNRLRYLQEIFAPALAKVDPNFFYRLEESSLVAEDKKYDVYPIFGKREEELLYHDTHKTIYHLRSELANNDRPADLRLVYLALAHIIKYRGNFLLEGEIDLRTTDINKVFAEFSETLNENSDENLGKLDVADIFKDNTFSKTKKSEELLKLSGKKNQLAHQLFKMMVGNMGSFKKVLGTDEEHKLSFGKDTYEDDLNDLLAEAGDQYLDIFVAAKKVYDAAILASILDVKDTQTKTVFSQAMIERYEEHQKDLIELKRVFKKYLPEKCHDFFSEPKISGYAGYIDGKVSEEDFYKYTKKTLKGIPETEEILQKIDANNYLRKQRTFDNGAIPHQVHLKELVAIVENQGKYYPFLRENKDKFEKILNFRIPYYVGPLARGNSKFAWLTRAGEGKITPYNFDEMIDKETSAEDFIKRMTINDLYLPTEPVLPKHSLLYERYTIFNELAGVRYVTENGEAKYFDAQTKRSIFELFKLDRKVSEKMVIKHLKVVMPAIRIQALKGLDNGKFNASYGTYKDLVDMGVAPELLNDEVNSEKWEDIIKTLTIFEGRKLIKRRLENYRDFLGEDILRKLSRKKYTGWGRLSAKLLDGIYDKKTHKTILDCLMEDYSQNFMQLINDDTYSFKETIKNAQVIEKEETLAKTVQELPGSPAIKKGILQSLEIVDEIIKVMGYKPKSIVVEMARETQTHGTRKREDRVQQIVKNLKELPKPSNAELSDERKYLYCLQNGRDMYTGAPLDYDHLQFYDVDHIIPQSFLKDDSIENKVLTIKKENVRKTNGLPSEAVIQKMGSFWKKLLDAGAMTNKKYDNLRRNLHGGLNEKLKERFIERQLVETRQITKYVAQLLDQRLNYDGNGVELDEKIAIVTLKAQLASQFRSEFKLRKVRALNNLHHAHDAYLNAVVANLIMAKYPELEPEFVYGKYRKTKFKGLGKATAKNTLYANVLYFLKENEVYPFWDKARDLPTIKRYLYRAQVNKVRKAERQTGGFSDEMLVPKSDSGKLLPRKEGLDPVKYGGYAKAVESYAVLITADEVKKGKTKKVKTLVNIPIIDSKKYEADPTAYLASRGYTNVTNSFILPKYSLLEDPEGRRRYLASKEFQKANELILPQHLVELLYWVNAKDGEQKLEDHKAEFKELFDKIMEFADKYVVAPKNSEKIRRLYEENQDATPMELGKNFVELLRYTADGAASDFKFFGENIPRKRYNSAGSLLNGTLIYQSKTGLYETRIDLGKL

SEQ ID NO: 231 - protein, 1292 aa, Lactobacillus curvatus
MSRPYNIGLDIGTSSIGWSVVDDQSKLVSVRGKYGYGVRLYDEGQTAAERRSFRTTRRRLKRRKWRLGLLREIFEPYITPVDDTFFLRKKQSNLSPKDQRKQTSLFNDRTDRAFYDDYPTIYHLRYKLMTEKRQFDIREIYLAMHHIVKYRGHFLNEAPVSSFKSSEINLVAHFDRLNTIFADLFSESGFTDKLAEVKALLLDNHQSASNRQRQALLLIYTPSKQNKAIATELLKAILGLKAKFNVLTGIEAEDVKTWTLTFNAENFDEEMVKLESSLDDNAHQIIESLQELYSGVLLAGIVPENQSLSQAMITKYDDHQKHLKMLKAVREALAPEDRQRLKQAYDQYVDGKSKEDFYGDITKALKNNPDHPIVSEIKKLIELDQFMPKQRTKDNGAIPHQLHQQELDRIIENQQQYYPWLAELNPNKLDELVAFRVPYYVGPLQQQSSDAKFAWMIRKAEGQITPWNFDDKVDRQASANEFIKRMTTTDTYLLAEDVLPKQSLIYQRFEVLNELNGLKIDDQPITTELKQAIFTDLFMQKTSVTVKNIQDYLVSEKRYASRPAITGLSDENKFNSRLSTYHDLKTIVGDAVDDVDKQADLEKCIEWSTIFEDGKIYSAKLNEIDWLTDQQRVQLAAKRYRGWGRLSAKLLTQIVNANGQRIMDLLWTTDNFMRIVHSEDFDKLITEANQMMLAENDVQDVINDLYTSPQNKKALRQILLVVNDIQKAMKGQAPERILIEFAREDEVNPRLSVQRKRQVEQVYQNISELEIRNELKDLSNSALSNTRLFLYFMQGGRDMYTGDSLNIDRLSTYDIDHILPQSFIKDNSLDNRVLVSQRMNRSKADQVPSVELGQKMQIQWEQMLRAGLITKKKYDNLTLNPDMKGFINRQLVETRQVIKLATNLLMEQYGEDNIELITVKSGLTHQMRTEFDFPKNRNLNNHHHAFDAYLTAFVGLYLLKRYPKLKPYFVYGEYQKASQQDKRNFNFLNGLKKDELVDENTEAVIWNKESGLAYLNKIYQFKKILVTREVHENSGALFNQTLYAAKDDKASGQLIPAKQDRPTALYGGYSGKTVAYMCIVRIKNKKGDLYKVCGVETSWLAQLKQKKAFLKQKISPQFTKVKKQKGTIVKVVEDFEVIAPHILINQRFFDNGQELTLGSHNEQELILDKTAVKLLNGALPLTQSEELAEQVYDEILDQVMHYFPLYDTNQFRAKLSAGKAADGNKMVQVGQQVILDRVLIGLHANAAVSDLGVLKISTPLGKMQQPSGISDTQIIYQSPTGLFERRVALRDL

SEQ ID NO: 232 - protein, 1291 aa, Lactobacillus farciminis
KEQPYNIGLDIGTGSVGWAVTNDNYDLLNIKKKNLWGVRLFEGAQTAKETRLNRSTRRRYRRRKNRINWLNEIFSEELANTDPSFLIRLQNSWVSKKDPDRKRDKYNLFIDNPYTDKEYYREFPTIFHLRKELIINKNKADIRLVYLALHNILKYRGNFTYEHQKFNISTLNSNLSKELIELNQQLIKYDISFPDNCDWNHISDILIGRGNATQKSSNILNNFTKETKKLLKEVINLILGNVAHLNTIFKTSLTKDEEKLSFSGKDIESKLDDLDSILDDDQFTVLDTANRIYSTITLNEILNGESYFSMAKVNQYENHAIDLCKLRDMWHTTKNEKAVGLSRQAYDDYINKKKELYTSLKKFLKVALPTNLAKEAEEKISKGTYLVKPRNSENGVVPYQLNKIEMEKIIDNQSQYYPFLKENKEKLLSILSFRIPYYVGPLQSSEKNPFAWMERKSNGHARPWNFDEIVDREKSSNKFIRRMTVTDSYLVGEPVLPKNSLIYQRYEVLNELNNIRITENLKTNPTGSRLTVETKQHIYNELFKNYKKITVKKLTKWLIAQGYYKNPILIGLSQKDEFNSTLTTYLDMKKIFGSSFMENNKNYNQIEELIEWLTIFEDKQILNEKLHSSNYSYTSDQIKKISNMRYKGWGRLSKKILTCITTETNTPKSLQLSNDLMWTTNNNFISIISNDKYDFKNYIENHNLNKNEDQNISNLVNDIHVSPALKRGITQSIKIVQEIVKFMGHAPKYIFIEVTRETKTTSRGKRIQRLQSKLLNKANGLVPEELKKHKNDLSSERIMLYFLQNGKSLYSEESLNINKLSDYQVDHILPRTYIPDDSLENKALVLAKENQRKADDLLLNSNVIDKNLERWTYMLNNNMMGLKKFKNLTRRVITDKDKLGFIHRQLVQTSQMVKGVANILNSMYKNQGTTCIQARANLSTAFRKALELVKNRNINDFHHAQDAYLASFLGTYRLRRFPTDEMLLMNGEYNKFYGKELYSKKSRKNGFIISPLVNGTTQDRNTGEIIWNVGFRDKILKIFNYHQCNVTRKTEIKTGQFYDQTIYSPKNPKKLIAQKKDMDPNIYGGFSGDNKSSITIVKIDNNKIKPVAIPIRLINDKKTLQNWLEENVKHKKSIQIIKNNVPIGQIIYSKKVGLLSREIANRQQLILPPEHSALLRILQIPDEDPDQILAFYDKNILVEILQELITKMKKFYPFYKNEQEFLASFNQATTSEKINSLEELITLLHANSTSAHLIFNNIEKKAFGRKTHGLTDTDFIYQSVTGLYETRIHIE

SEQ ID NO: 233 - protein, 1327 aa, Listeria innocua
MKKPYTIGLDIGTNSVGWAVLTDQYDLVKRKMKIAGDSEKKQIKKNFWGVRLFDEGQTAADRRMARTARRRIERRRNRISYLQGIFAEEMSKTDANFFCRLSDSFYVDNEKRNSRHPFFATIEEEVEYHKNYPTIYHLREELVNSSEKADLRLVYLALAHIIKYRGNFLIEGALDTQNTSVDGIYKQFIQTYNQVFASGIEKLEDNKDVAKILVEKVTRKEKLERILKLYPGEKSAGMFAQFISLIVGSKGNFQKPFDLIEKSDIECAKDSYEEDLESLLALIGDEYAELFVAAKNAYSAVVLSSIITVAETETNAKLSASMIERFDTHEEDLGELKAFIKLHLPKHYEEIFSNTEKHGYAGYIDGTKQADFYKYMKMTLENIEGADYFIAKIEKENFLRKQRTFDNGAIPHQLHLEELEAILHQQAKYYPFLKENYDKIKSLVTFRIPYFVGPLANGQSEFAWLTRKADGEIRPWNIEEKVDFGKSAVDFIEKMTNKDTYLPKENVLPKHSLCYQKYLVYNELTKVRYINDQGKTSYFSGQEKEQIFNDLFKQKRKVKKKDLELFLRNMSHVESPTIEGLEDSFNSSYSTYHDLLKVGIKQEILDNPVNTEMLENIVKILTVFEDKRMIKEQLQQFSDVLDGVVLKKLERRHYTGWGRLSAKLLMGIRDKQSHLTILDYLMDDGLNRNLMQLINDSNLSFKSIIEKEQVTTADKDIQSIVADLAGSPAIKKGILQSLKIVDELVSVMGYPPQTIVVEMARENQTTGKGKNNSRPRYKSLEKAIKEFGSQILKEHPTDNQELRNNRLYLYYLQNGKDMYTGQDLDIHNLSNYDIDHIVPQSFITDNSIDNLVLTSSAGNREKGDDVPPLEIVRKRKVFWEKLYQGNLMSKRKFDYLTKAERGGLTEADKARFIHRQLVETRQITKNVANILHQRFNYEKDDHGNTMKQVRIVTLKSALVSQFRKQFQLYKVRDVNDYHHAHDAYLNGVVANTLLKVYPQLEPEFVYGDYHQFDWFKANKATAKKQFYTNIMLFFAQKDRIIDENGEILWDKKYLDTVKKVMSYRQMNIVKKTEIQKGEFSKATIKPKGNSSKLIPRKTNWDPMKYGGLDSPNMAYAVVIEYAKGKNKLVFEKKIIRVTIMERKAFEKDEKAFLEEQGYRQPKVLAKLPKYTLYECEEGRRRMLASANEAQKGNQQVLPNHLVTLLHHAANCEVSDGKSLDYIESNREMFAELLAHVSEFAKRYTLAEANLNKINQLFEQNKEGDIKAIAQSFVDLMAFNAMGAPASFKFFETTIERKRYNNLKELLNSTIIYQSITGLYESRKRLDD

SEQ ID NO: 234 - protein, 1327 aa, Listeria innocua
MKKPYTIGLDIGTNSVGWAVLTDQYDLVKRKMKIAGDSEKKQIKKNFWGVRLFDEGQTAADRRMARTARRRIERRRNRISYLQGIFAEEMSKTDANFFCRLSDSFYVDNEKRNSRHPFFATIEEEVEYHKNYPTIYHLREELVNSSEKADLRLVYLALAHIIKYRGNFLIEGALDTQNTSVDGIYKQFIQTYNQVFASGIEKLEDNKDVAKILVEKVTRKEKLERILKLYPGEKSAGMFAQFISLIVGSKGNFQKPFDLIEKSDIECAKDSYEEDLESLLALIGDEYAELFVAAKNAYSAVVLSSIITVAETETNAKLSASMIERFDTHEEDLGELKAFIKLHLPKHYEEIFSNTEKHGYAGYIDGTKQADFYKYMKMTLENIEGADYFIAKIEKENFLRKQRTFDNGAIPHQLHLEELEAILHQQAKYYPFLKENYDKIKSLVTFRIPYFVGPLANGQSEFAWLTRKADGEIRPWNIEEKVDFGKSAVDFIEKMTNKDTYLPKENVLPKHSLCYQKYLVYNELTKVRYINDQGKTSYFSGQEKEQIFNDLFKQKRKVKKKDLELFLRNMSHVESPTIEGLEDSFNSSYSTYHDLLKVGIKQEILDNPVNTEMLENIVKILTVFEDKRMIKEQLQQFSDVLDGVVLKKLERRHYTGWGRLSAKLLMGIRDKQSHLTILDYLMDDGLNRNLMQLINDSNLSFKSIIEKEQVTTADKDIQSIVADLAGSPAIKKGILQSLKIVDELVSVMGYPPQTIVVEMARENQTTGKGKNNSRPRYKSLEKAIKEFGSQILKEHPTDNQELRNNRLYLYYLQNGKDMYTGQDLDIHNLSNYDIDHIVPQSFITDNSIDNLVLTSSAGNREKGDDVPPLEIVRKRKVFWEKLYQGNLMSKRKFDYLTKAERGGLTEADKARFIHRQLVETRQITKNVANILHQRFNYEKDDHGNTMKQVRIVTLKSALVSQFRKQFQLYKVRDVNDYHHAHDAYLNGVVANTLLKVYPQLEPEFVYGDYHQFDWFKANKATAKKQFYTNIMLFFAQKDRIIDENGEILWDKKYLDTVKKVMSYRQMNIVKKTEIQKGEFSKATIKPKGNSSKLISRKTNWDPMKYGGLDSPNMAYAVVIEYAKGKNKLVFEKKIIRVTIMERKAFEKDEKAFLEEQGYRQPKVLAKLPKYTLYECEEGRRRMLASANEAQKGNQQVLPNHLVTLLHHVANCEVSDGKSLDYIESNREMFAELLAHVSEFAKRYTLAEANLNKINQLFEQNKEGDIKAIAQSFVDLMAFNAMGAPASFKFFETTIERKRYNNLKELLNSTIIYQSITGLYESRKRLDD

SEQ ID NO: 235 - protein, 1327 aa, Listeria innocua ATCC 33091; identical to SEQ ID NO: 234

SEQ ID NO: 236 - protein, 1101 aa, Listeria innocua FSL S4-378
LKLYPGEKSTGMFAQFISLIVGSKGNFQKPFDLIEKSDIECAKDSYEEDLESLLALIGDEYAELFVAAKNAYSAVVLSSIITVAETETNAKLSASMIERFDTHEEDLGELKAFIKLHLPKHYEEIFSNTEKHGYAGYIDGTKQADFYKYMKTTLENIEGADYFIAKIEKENFLRKQRTFDNGAIPHQLHLEELEAILHQQAKYYPFLKENYDKIKSLVTFRIPYFVGPLANGQSEFAWLTRKADGEIRPWNIEEKVDFGKSAVDFIEKMTNKDTYLPKENVLPKHSLCYQKYLVYNELTKVRYINDQGKTSYFSGQEKEQIFNDLFKQKRKVKKKDLELFLRNMSHVESPTIEGLEDSFNSSYSTYHDLLKVGIKQEILDNPVNTEMLENIVKILTVFEDKRMIKEQLQQFSDVLDGVVLKKLERRHYTGWGRLSAKLLMGIRDKQSHLTILDYLMDDGLNRNLMQLINDSNLSFKSIIEKEQVTTADKDIQSIVADLAGSPAIKKGILQSLKIVDELVSVMGYPPQTIVVEMARENQTTGKGKNNSRPRYKSLEKAIKEFGSQILKEHPTDNQELKNNRLYLYYLQNGKDMYTGQDLDIHNLSNYDIDHIVPQSFITDNSIDNLVLTSSAGNREKGNDVPPLEIVQKRKVFWEKLYQGNLMSKRKFDYLTKAERGGLTEADKARFIHRQLVETRQITKNVANILHQRFNYGKDDHGNTMKQVRIVTLKSALVSQFRKQFQLYKVRGVNDYHHAHDAYLNGVVANTLLKVYPQLEPEFVYGDYHQFDWFKANKATAKKQFYTNIMLFFAQKDRIIDENGEILWDKKYLDTVKKVMSYRQMNIVKKTEIQKGEFSKATIKPKGNSSKLIPRKTNWDPMKYGGLDSPNMAYAVVIEYAKGKNKLVFEKKIIRVTIMERKAFEKDEKAFLEEQGYRQPKVLAKLPKYTLYECEEGRRRMLASANEAQKGNQQVLPNHLVTLLHHAANCEVSDGKSLDYIESNREMFAELLAHVSEFAKRYTLAEANLNKINQLFEQNKEGDIKAIAQSFVDLMAFNAMGAPASFKFFETTIERKRYNNLKELLNSTIIYQSITGLYESRKRLDD

SEQ ID NO: 237 - protein, 1327 aa, Listeria ivanovii
MRKPYTIGLDIGTNSVGWAVLTDQYNLVKRKMKVAGSAEKKQIKKNFWGVRLFDEGEVAAGRRMNRTTRRRIERRRNRIAYLQEIFAAEMAEVDANFFYRLEDSFYIESEKRHSRHPFFATIEEEVAYHEEYKTIYHLREKLVNSSDKADLRLVYLALAHIIKYRGNFLIEGMLDTKNTSVDEVFKQFIQTYNQIFASDIERLEENKEVAEILSEKLTRREKLDKILKLYTGEKSTGMFARFINLIIGSKGDFKKVFDLDEKAEIECAKDTYEEDLEALLAKIGDEYAEIFVAAKSTYNAVVLSNIITVTDTETKAKLSASMIERFDKHAKDLKRLKAFFKMQLPEKFNEVFNDIEKDGYAGYIDGTTQEKFYKYMKKMLANIDGADYFIDQIEEENFLRKQRTFDNGTIPHQLHLEELEAILHQQAKYYPFLRKDYEKIRSLVTFRIPYFIGPLANGQSDFAWLTRKADGEIRPWNIEEKVDFGKSAIDFIEKMTNKDTYLPKENVLPKHSLCYQKYMVYNELTKIRYIDDQGKTHHFSGQEKQQIFNGLFKQQRKVKKKDLERFLYTINHIESPTIEGVEDAFNSSFATYHDLQKGGVTQEILDNPLNADMLEEIVKILTVFEDKRMIKEQLQSFSDVLDGTILKKLERRHYTGWGRLSAKLLTGIRDKHSHLTILDYLMDDGLNRNLMQLINDSNLSFKSIIEKEQVSTADKGIQSIVAELAGSPAIKKGILQSLKIVDELVGIMGYPPQTIVVEMARENQTTGKGKNNSKPRFISLEKAIKEFGSQILKEHPTDNQCLKNDRLYLYYLQNGKDMYTGKELDIHNLSNYDIDHIIPQSFITDNSIDNRVLVSSTANREKGDNVPLLEVVRKRKAFWEKLYQAKLMSKRKFDYLTKAERGGLTEADKANFIQRQLVETRQITKNVANILYQRFNCKQDENGNEVEQVRIVTLKSTLVSQFRKQFQLYKVREVNDYHHAHDAYLNGVVANTLLKVYPQLEPEFVYGDYHQFDWFKANKATAKKQFYTNIMRFFAKENQIIDKNGEILWDNRYLDTIKKVLSYRQMNIVKKTEIQKGEFSNATVNPKGNSSKLISRKADWNPIKYGGFDGSNMAYSIVIEYEKRKKKTVIKKELIQINIMERVAFEKDQKAFLEEKGYYSPKVLTKIPKYTLYECENGRRRMLGSANEAQKGNQMVLPNHLMTLLYHAKNCEANDGESLAYIEMHREMFAELLAYISEFAKRYTLANDRLEKINMFFEQNKKGDIKVIAKSFDKLKVFNAFGAPRDFEFFETTIKRKRYYNIKELLNATIIYQSITGLYEARKRLED

SEQ ID NO: 238 - protein, 952 aa, Listeria ivanovii FSL F6-596
MKKMLANIDGADYFIDQIEEENFLRKQRTFDNGTIPHQLHLEELEAILHQQAKYYPFLRKDYEKIRSLVTFRIPYFIGPLANGQSDFAWLTRKADGEIRPWNIEEKVDFGKSAIDFIEKMTNKDTYLPKENVLPKHSLCYQKYMVYNELTKIRYIDDQGKTHHFSGQEKQQIFNGLFKQQRKVKKKDLERFLYTINHIESPTIEGVEDAFNSSFATYHDLQKGGVTQEILDNPLNADMLEEIVKILTVFEDKRMIKEQLQSFSDVLDGTILKKLERRHYTGWGRLSAKLLTGIRDKHSHLTILDYLMDDGLNRNLMQLINDSNLSFKSIIEKEQVSTADKGIQSIVAELAGSPAIKKGILQSLKIVDELVGIMGYPPQTIVVEMARENQTTGKGKNNSKPRFISLEKAIKEFGSQILKEHPTDNQCLKNDRLYLYYLQNGKDMYTGKELDIHNLSNYDIDHIIPQSFITDNSIDNRVLVSSTANREKGDNVPLLEVVRKRKAFWEKLYQAKLMSKRKFDYLTKAERGGLTEADKANFIQRQLVETRQITKNVANILYQRFNCKQDENGNEVEQVRIVTLKSTLVSQFRKQFQLYKVREVNDYHHAHDAYLNGVVANTLLKVYPQLEPEFVYGDYHQFDWFKANKATAKKQFYTNIMRFFAKENQIIDKNGEILWDNRYLDTIKKVLSYRQMNIVKKTEIQKGEFSNATVNPKGNSSKLISRKADWNPIKYGGFDGSNMAYSIVIEYEKRKKKTVIKKELIQINIMERVAFEKDQKAFLEEKGYYSPKVLTKIPKYTLYECENGRRRMLGSANEAQKGNQMVLPNHLMTLLYHAKNCEANDGESLAYIEMHREMFAELLAYISEFAKRYTLANDRLEKINMFFEQNKKGDIKVIAKSFDKLKVFNAFGAPRDFEFFETTIKRKRYYNIKELLNATIIYQSITGLYEARKRLED

SEQ ID NO: 239 - protein, 1327 aa, Listeria monocytogenes
MKNPYTIGLDIGTNSVGWAVLTNQYDLVKRKMKVAGNSDKKQIKKNFWGVRLFDDGQTAVDRRMNRTARRRIERRRNRISYLQEIFAVEMANIDANFFCRLNDSFYVDSEKRNSRHPFFATIEEEVAYHDNYRTIYHLREKLVNSSEKADLRLVYLALAHIIKYRGNFLIEGALDTKNTSVDEVYKQFIETYNQVFMSNIEKVEENIEVANILAGKFTRREKFERILQLYPGEKSTGMFAQFISLIVGSKGNFQKVFDLIEKTDIECAKDSYEEDLETLLAIIGDEYAELFVAAKNTYNAVVLSSIITVTDTETNAKLSASMIERFDAHEKDLVELKAFIKLNLPKQYEEIFSNAAIDGYAGYIDGTKQVDFYKYLKTILENIEGSDYFIAKIEEENFLRKQRTFDNGAIPHQLHLEELEAIIHQQAKYYPFLKEDYDKIKSLVTFRIPYFVGPLANGQSEFAWLTRKADGEIRPWNIEEKVDFGKSAVDFIEKMTNKDTYLPKENVLPKHSLCYQKYMVYNELTKIRYIDDQGKTNYFSGREKQQVFNDLFKQKRKVKKKDLELFLRNINHIESPTIEGLEDSFNASYATYHDLLKVGMKQEILDNPLNTEMLEDIVKILTVFEDKPMIKEQLQQFSDVLDGGVLKKLERRHYTGWGRLSAKLLVGIREKQSHLTILDYLMDDGLNRNLMQLINDSNLSFKSIIEKEQVSTTDKDLQSIVAELAGSPAIKKGILQSLKIVDELVSIMGYPPQTIVVEMARENQTTGKGKNNSKPRYKSLEKAIKEFGSQILKEHPTDNQELKNNRLYLYYLQNGKDMYTGQELDIHNLSNYDIDHIVPQSFITDNSIDNLVLTSSAGNREKGGDVPPLEIVRKRKVFWEKLYQGNLMSKRKFDYLTKAERGGLTEADKARFIHRQLVETRQITKNVANILYQRFNKETDNHGNTMEQVRIVTLKSALVSQFRKQFQLYKVREVNGYHHAHDAYLNGVVANTLLKVYPQLEPEFVYGEYHQFDWFKANKATAKKQFYTNIMLFFAQKERIIDENGEILWDKKYLETIKKVLDYRQMNIVKKTEIQKGEFSKATIKPKGNSSKLIPRKENWDPMKYGGLDSPNMAYAVIIEHAKGKKKIVIEKKLIQINIMERKMFEKDEEAFLEEKGYRHPKVLTKLPKYTLYECEKGRRRMLASANEAQKGNQLVLSNHLVSLLYHAKNCEASDGKSLKYIEAHRETFSELLAQVSEFATRYTLADANLSKINNLFEQNKEGDIKAIAQSFVDLMAFNAMGAPASFKFFEATIDRKRYTNLKELLSSTIIYQSITGLYESRKRLDD

SEQ ID NO: 240 - protein, 1327 aa, Listeria monocytogenes
MKNPYTIGLDIGTNSVGWAVLTDQYDLVKRKMKVAGNSDKKQIKKNFWGVRLFDDGQTAVDRRMNRTARRRIERRRNRISYLQEIFAVEMANIDANFFCRLNDSFYVDSEKRNSRHPFFATIEEEVAYHKNYRTIYHLREELVNSSEKADLRLVYLALAHIIKYRGNFLIEGALDTKNTSVDEVYKQFIQTYNQVFMSNIEKVEENTEVASILAGKFTRREKFERILRLYPGEKSTGMFAQFISLIVGNKGNFQKVFNLVEKTDIECAKDSYEEDLEALLAIIGDEYAELFVAAKNTYNAVVLSSIITVTATETNAKLSASMIERFDAHEKELGELKAFIKLHLPKQYQEIFNNAEIDGYAGYIDGTKQVDFYKYLKTTLENVEGADYFITKIEEENFLRKQRTFDNGVIPHQLHLEELEAILHQQAKYYPFLREGYDKIKSLVTFRIPYFVGPLANGQSEFAWLTRKDDGEIRPWNIEEKVDFGKSAVDFIEKMTNKDTYLPKENVLPKHSLCYQKYMVYNELTKIRYIDDQGKTNYFSGREKQQIFNDLFKQKRKVKKKDLELFLRNINHIESPTIEGLEDSFNASYATYHDLLKVGLKQEILDNPLNTEILEDIVKILTVFEDKRMIKEQLEQFSDVLDGVVLKKLERRHYTGWGRLSAKLLVGIRDKQSHLTILDYLMDDGLNRNLMQLINDSNLSFKSIIEKEQVSTTDKDLQSIVADLAGSPAIKKGILQSLKIVDELVSIMGYPPQTIVVEMARENQTTGKGKNNSKPRYKSLEKAIKDFGSQILKEHPTDNQELKNNRLYLYYLQNGKDIYTGQELDIHNLSNYDIDHIVPQSFITDNSIDNLVLTSSAGNREKGGDVPPLEIVRKRKVFWEKLYQGNLMSKRKFDYLTKAERGGLTEADKARFIHRQLVETRQITKNVANILHQRFNKETDNHGNTMEQVRIVTLKSALVSQFRKQFQLYKVREVNDYHHAHDAYLNGVVANTLLKVYPQLEPEFVYGEYHQFDWFKANKATAKKQFYTNIMLFFAQKERIIDENGEILWDKKYLETIKKVLDYRQINIVKKTEIQKGEFSKATIKPKGNSSKLIPRKENWDPMKYGGLDSPNMAYAVIIEHAKGKKKIVIEKKLIQINIMERKMFEKDEEAFLEEKGYHQPKVLTKLPKYTLYECEKGRRRMLSSANEAQKGNQLVLSNHLVSLLYHAKNCEASDGKSLKYIEAHRETFSELLAQVSEFATKYTLADANLSKINNLFEQNKEGDIKAIAQSFVDLMAFNAMGAPASFKFFEATIDRKRYTNLKELLSSTIIYQSITGLYESRKRLDD

SEQ ID NO: 241 - protein, 1327 aa, Listeria monocytogenes
MKNPYTIGLDIGTNSVGWAVLTDQYDLVKRKMKVAGNSDKKQIKKNFWGVRLFDDGQTAVDRRMNRTARRRIERRRNRISYLQEIFAVEMANIDANFFCRLNDSFYVDSEKRNSRHPFFATIEEEVAYHKNYRTIYHLREELVNSSEKADLRLVYLALAHIIKYRGNFLIEGALDTKNTSVDEVYKQFIQTYNQVFMSNIEKVEENTEVASILAGKFTRREKFERILRLYPGEKSTGMFAQFISLIVGNKGNFQKVFNLVEKTDIECAKDSYEEDLEALLAIIGDEYAELFVAAKNTYNAVVLSSIITVTATETNAKLSASMIERFDAHEKELGELKAFIKLHLPKQYQEIFNNAEIDGYAGYIDGTKQVDFYKYLKTTLENVEGADYFITKIEEENFLRKQRTFDNGVIPHQLHLEELEAILHQQAKYYPFLREGYDKIKSLVTFRIPYFVGPLANGQSEFAWLTRKDDGEIRPWNIEEKVDFGKSAVDFIEKMTNKDTYLPKENVLPKHSLCYQKYMVYNELTKIRYIDDQGKTNYFSGREKQQIFNDLFKQKRKVKKKDLELFLRNINHIESPTIEGLEDSFNASYATYHDLLKVGLKQEILDNPLNTEILEDIVKILTVFEDKRMIKEQLEQFSDVLDGVVLKKLERRHYTGWGRLSAKLLVGIRDKQSHLTILDYLMDDGLNRNLMQLINDSNLSFKSIIEKEQVSTTDKDLQSIVADLAGSPAIKKGILQSLKIVDELVSIMGYPPQTIVVEMARENQTTGKGKNNSKPRYKSLEKAIKDFGSQILKEHPTDNQELKNNRLYLYYLQNGKDIYTGQELDIHNLSNYDIDHIVPQSFITDNSIDNLVLTSSAGNREKGGDVPPLEIVRKRKVFWEKLYQGNLMSKRKFDYLTKAERGGLTEADKARFIHRQLVETRQITKNVANILHQRFNKETDNHGNTMEQVRIVTLKSALVSQFRKQFQLYKVREVNDYHHAHDAYLNGVVANTLLKVYPQLEPEFVYGEYHQFDWFKANKATAKKQFYTNIMLFFAQKERIIDENGEILWDKKYLETIKKVLDYRQINIVKKTEIQKGEFSKATIKPKGNSSKLIPRKENWDPVKYGGLDSPNMAYAVIIEHAKGKKKIVIEKKLIQINIMERKMFEKDEEAFLEEKGYHQPKVLTKLPKYTLYECEKGRRRMLSSANEAQKGNQLVLSNHLVSLLYHAKNCEASDGKSLKYIEAHRETFSELLAQVSEFATKYTLADANLSKINNLFEQNKEGDIKAIAQSFVDLMAFNAMGAPASFKFFEATIDRKRYTNLKELLSSTIIYQSITGLYESRKRLDD

SEQ ID NO: 242 - protein, 1327 aa, Listeria monocytogenes
MKKPYTIGLDIGTNSVGWAVLTDQYDLVKRKMKISGDSEKKQIKKNFWGVRLFEKGETAAKRRMSRTARRRIERRRNRISYLQEIFAIQMNEVDDNFFNRLKESFYAESDKKYNRHPFFGTVEEEVAYYKDFPTIYHLRKELIDSQKKADLRLVYLALAHIIKYRGHFLIEGALDTKNTSIDEMFKQFLQIYNQVFANDIEKTEKNQEVAQILAEKFTRKDKLDKILSLYPGEKTTGVFAQFVNIIVGSTGKFKKHFNLHEKKDINCAEDTYDTDLESLLAIIGDEFAEVFVAAKNAYNAVVLSNIITVTDSTTRAKLSASLIERFENHKEDLKKMKRFVRTYLPEKYDEIFDDTEKHGYAGYISGTKQADFYKYMKATLEKIEGADYFIAKIEEENFLRKQRTFDNGVIPHQLHLEELEAILHQQAKYYPFLREDYEKIKSLVTFRIPYFVGPLAKGQSEFAWLTRKADGEIRPWNIEEKVDFGKSAVDFIEKMTNKDTYLPKENVLPKHSLCYQKYMVYNELTKVRYIDDQGKTNYFSGQEKQQIFNDLFKQKRKVKKKDLELFLRNINQIESPTIEGLEDSFNASYATYHDLLKVGMKQEILDNPLNTEMLEDIVKILTVFEDKRMIKEQLQQFSDVLDGTVLKKLERRHYTGWGRLSAKLLVGIRDKQSHLTILDYLMDDGLNRNLMQLINDSNLSFKSIIEKEQVSTTDKDLQSIVAELAGSPAIKKGILQSLKIVDELVSVMGYPPQTIVVEMARENQTTNKGKNNSKPRYKSLEKAIKEFGSQILKEHPTDNQELKNNRLYLYYLQNGKDMYTGQELDIHNLSNYDIDHIVPQSFITDNSVDNLVLTSSAGNREKGDNVPPLEIVQKRKIFWEKLYQGNLMSKRKFDYLTKAERGGLTEADKARFIHRQLVETRQITKNVANILHQRFNYKTDGNKDTMETVRIVTLKSALVSQFRKQFQFYKVREVNDYHHAHDAYLNGVVANTLLKVYPQLEPEFVYGEYHQFGWFKANKATAKKQFYTNIMLFFAQKDRIIDENGEILWDKRYLETVKKVLGYRQMNIVKKTEIQKGEFSNVTPNPKGKSNKLIPRKKDWDPIKYGGFDGSKMAYAIIIEYEKQKRKVRIEKKLIQINIMEREAFEKDEKTFLEEKGYHQPKVLIKVPKYTLYECKNGRRRMLGSANEAHKGNQMLLPNHLMALLYHAEKYEAIDGESLAYIEVHRALFDELLAYISEFARKYTLSNDRLDEINMLYERNKDGDVKSIAESFVSLKKFNAFGVHQDFSFFGTKIERKRDRKLNELLNSTIIYQSITGLYESRKRLDN

SEQ ID NO: 243 - protein, 1327 aa, Listeria monocytogenes
MKNPYTIGLDIGTNSVGWAVLTDQYDLVKRKMKVAGNSDKKQIKKNFWGVRLFDEGETAADRRMNRTARRRIERRRNRISYLQEIFALEMANIDANFFCRLNDSFYVDSEKRNSRHPFFATIEEEVAYHKNYRTIYHLREELVNSSEKADLRLVYLALAHIIKYRGNFLIEGALDTKNTSVDGVYKQFIQTYNQVFISNIEKMEENTTVADILAGKFTRKEKLERILQLYPGEKSTGMFAQFISLIVGSKGNFQKVFDLVEKTDIECAKDSYEEDLEALLAIIGDEYAELFVAAKNTYNAVVLSSIITVTDTETNAKLSASMIERFDAHEKDLSELKAFIKLHLPKQYEEIFSNVAIDGYAGYIDGTKQVDFYKYLKTLLENIEGADYFIAKIEEENFLRKQRTFDNGAIPHQLHLEELEAILHQQAKYYPFLKEAYDKIKSLVTFRIPYFVGPLANGQSDFAWLTRKADGEIRPWNIEEKVDFGKSAVDFIEKMTNKDTYLPKENVLPKHSLYYQKYMVYNELTKVRYIDDQGKTNYFSGQEKQQIFNDYFKQKRKVSKKDLEQFLRNMSHIESPTIEGLEDSFNSSYATYHDLLKVGIKQEVLENPLNTEMLEDIVKILTVFEDKRMIKEQLQQFSDVLDGAVLKKLERRHYTGWGRLSAKLLVGIRDKQSHLTILDYLMDDGLNRNLMQLINDSNLSFKSIIEKEQVSTTDKDLQSIVADLAGSPAIKKGILQSLKIVDELVSIMGYPPQTIVVEMARENQTTVKGKNNSRPRYKSLEKAIKEFGSQILKEHPTDNQELRNNRLYLYYLQNGKDMYTGQELDIHNLSNYDIDHIVPQSFITDNSIDNLVLTSSAGNREKGDDVPPLEIVRKRKVFWEKLFQGNLMSKRKFDYLTKAERGGLTEADKATFIHRQLVETRQITKNVANILHQRFNNETDNHGNNMEQVRIVMLKSALVSQFRKQFQLYKVREVNDYHHAHDAYLNGVVANTLLKVYPQLEPEFVYGEYHQFDWFKANKATAKKQFYTNIMLFFAQKERIIDENGEILWDKKYLETIKKVLDYRQMNIVKKTEIQKGEFSKATIKPKGNSSKLIPRKENWDPMKYGGLDSPNMAYAVIIEHAKGKKKVVFEKKIIRITIMERKAFEKDEKSFLEKQGYRQPKVLTKLPKYTLYECENGRRRMLASANEAQKGNQQVLKGQLITLLHHAKNCEASDGKSLDYIESNREMFGELLAHVSEFAKRYTLADANLSKINQLFEQNKDNDIKVIAQSFVNLMAFNAMGAPASFKFFEATIERKRYTNLKELLSATIIYQSITGLYEARKRLDG

SEQ ID NO: 244 - protein, 1327 aa, Listeria monocytogenes
MKNPYTIGLDIGTNSVGWAVLTNQYDLVKRKMKVAGNSDKKQIKKNFWGVRLFDDGQTAVDRRMNRTARRRIERRRNRISYLQEIFAVEMANIDANFFCRLNDSFYVDSEKRNSRHPFFATIEEEVAYHKNYRTIYHLREELVNSSEKADLRLVYLALAHIIKYRGNFLIEGALDTKNTSVDGVYEQFIQTYNQVFMSNIEKVEENIEVANILAGKFTRREKFERILQLYPGEKSTGMFAQFISLIVGSKGNFQKVFDLIEKTDIECAKDSYEEDLEALLAIIGDEYAELFVAAKNTYNAVVLSSIITVTATETNAKLSASMIERFDAHEKDLGELKAFIKLHLPKQYQEIFNNAAIDGYAGYIDGTKQVDFYKYLKTILENIEGADYFIAKIEEENFLRKQRTFDNGAIPHQLHLEELEAIIHQQAKYYPFLREDYEKIKSLVTFRIPYFVGPLAKGQSEFAWLTRKADGEIRPWNIEEKVDFGKSAVDFIEKMTNKDTYLPKENVLPKHSLCYQKYMVYNELTKVRYIDDQGKTNYFSGQEKQQIFNDLFKQKRKVKKKDLELFLRNINHIESPTIEGLEDSFNASYATYHDLLKVGMKQEILDNPLNTEMLEDIVKILTVFEDKPMIKEQLQQFSDVLDGGVLKKLERRHYTGWGRLSAKLLVGIREKQSHLTILDYLMDDGLNRNLMQLINDSNLSFKSIIEKEQVSTTDKDLQSIVADLAGSPAIKKGILQSLKIVDELVSIMGYPPQTIVVEMARENQTTGKGKNNSKPRYKSLEKAIKEFGSKILKEHPTDNQELKNNRLYLYYLQNGKDMYTGQELDIHNLSNYDIDHIVPQSFITDNSIDNLVLTSSAGNREKGGDVPPLEIVRKRKVFWEKLYQGNLMSKRKFDYLTKAERGGLTDADKARFIHRQLVETRQITKNVANILHQRFNNETDNHGNTMEQVRIVTLKSALVSQFRKQFQLYKVREVNDYHHAHDAYLNGVVANTLLKVYPQLEPEFVYGEYHQFDWFKANKATAKKQFYTNIMLFFGQKERIIDENGEILWDKKYLETIKKVLDYRQMNIVKKTEIQKGEFSKATIKPKGNSSKLIPRKENWDPMKYGGLDSPNMAYAVIIEHAKGKKKLIFEKKIIRITIMERKMFEKDEEAFLEEKGYRHPKVLTKLPKYTLYECEKGRRRMLASANEAQKGNQLVLSNHLVSLLYHAKNCEASDGKSLKYIEAHRETFSELLAQVSEFATRYTLADANLSKINNLFEQNKEGDIQAIAQSFVDLMAFNAMGAPASFKFFEATIDRKRYTNLKELLSSTIIYQSITGLYESRKRLDD

SEQ ID NO: 245 - protein, 1327 aa, Listeria monocytogenes
MKNPYTIGLDIGTNSVGWAVLTNQYDLVKRKMKVAGNSDKKQIKKNFWGVRLFDDGQTAVDRRMNRTARRRIERRRNRISYLQEIFAVEMANIDANFFCRLNDSFYVDSEKRNSRHPFFATIEEEVAYHKNYRTIYHLREELVNSSEKADLRLVYLALAHIIKYRGNFLIEGALDTKNTSVDGVYEQFILTYNQVFMSNIEKVEENIEVANILAGKFTRREKFERILQLYPGEKSTGMFAQFISLIVGSKGNFQKVFDLIEKTDIECAKDSYEEDLETLLAIIGDEYAELFVAAKNTYNAVVLSSIITVTDTETNAKLSASMIERFDAHEKDLVELKAFIKLNLPKQYEEIFSNAAIDGYAGYIDGTKQVDFYKYLKTTLENVEGADYFITKIEEENFLRKQRTFDNGVIPHQLHLEELEAILHQQAKYYPFLREDYEKIKSLVTFRIPYFVGPLAKGQSEFAWLTRKADGEIRPWNIEEKVDFGKSAVDFIEKMTNKDTYLPKENVLPKHSLCYQKYMVYNELTKIRYIDDQGKTNYFSGQEKQQIFNDLFKQKRKVKKKDLELFLRNINHVESPTIEGLEDSFNASYATYHDLMKVGIKQEILDNPLNTEMLEDIVKILTVFEDKRMIKEQLQQFSDVLDGTVLKKLERRHYTGWGRLSAKLLVGIRDKQSHLTILDYLMDDGLNRNLMQLINDSNLSFKSIIEKEQVSTADKDLQSIVADLAGSPAIKKGILQSLKVVEELVSVMGYPPQTIVVEMARENQTTNKGKNNSKPRYKSLEKAIKEFGSQILKEHPTDNQELKNNRLYLYYLQNGKDMYTGQELDIHNLSNYDIDHIVPQSFITDNSIDNLVLTSSAGNREKGDNVPPLEIVQKRKIFWEKLYQGNLMSKRKFDYLTKAERGGLTEADKARFIHRQLVETRQITKNVANILHQRFNYKTDDNEDTMEPVRIVTLKSALVSQFRKQFQLYKVREVNDYHHAHDAYLNGVVANTLLKVYPQLEPEFVYGEYHQFDWFKANKATAKKQFYTNIMLFFAQKERIIDENGEILWDKKYLETIKKVLNYRQMNIVKKTEIQKGEFSNQNPKPRGDSSKLIPKKTNLNPIKYGGFEGSNMAYAIIIEHEKRKKKVTIEKKLIQINIMERKAFEKDEKVFLEGKGYHQPKVLTKLPKYALYECENGRRRMLGSANEVHKGNQMLLPNHLMTLLYHAEKREAIDGESLAYIEAHKAVFGELLAHISEFARKYTLANDKLDEINMLYERNKDGDVKSIAESFVSLKKFNAFGVHKDFNFFGTTIKRKRDRKLKELLNSTIIYQSITGLYESRKRLDS

SEQ ID NO: 246 - protein, 1327 aa, Listeria monocytogenes
MKNPYTIGLDIGTNSVGWAVLTDQYDLVKRKMKVAGNSDKKQIKKNFWGVRLFDDGQTAVDRRMNRTARRRIERRRNRISYLQEIFAVEMANIDANFFCRLNDSFYVDSEKRNSRHPFFATIEEEVAYHKNYRTIYHLREELVNSSEKADLRLVYLALAHIIKYRGNFLIEGALDTKNTSVDGVYEQFIQTYNQVFMSNIEKVEENIEVANILAGKFTRREKFERILQLYPGEKSTGMFAQFISLIVGSKGNFQKVFDLIEKTDIECAKDSYEEDLETLLAIIGDEYAELFVAAKNTYNAVVLSSIITVNDTETNAKLSASMIERFDAHEKDLVELKAFIKLNLPKQYEEIFSNAAIDGYAGYIDGTKQVDFYKYLKTILENIEGSDYFIAKIEEENFLRKQRTFDNGAIPHQLHLEELEAIIHQQAKYYTFLKEDYDKIKSLVTFRIPYFVGPLANGQSEFAWLTRKADGEIRPWNIEEKVDFGKSAVDFIEKMTNKDTYLPKENVLPKHSLCYQKYMVYNELTKVRYIDDQGKTNYFSGQEKQQIFNDLFKQKRKVKKKDLELFLRNINQIESPTIEGLEDSFNASYATYHDLLKVGMKQEILDNPLNTEMLEDIVKILTVFEDKRMIKEQLQQFSDVLDGVVLKKLERRHYTGWGRLSAKLLVGIRDKQSHLTILEYLMDDGLNRNLMQLINDSNLSFKSIIEKEQVSTTDKDLQSIVAELAGSPAIKKGILQSLKIVDELVSIMGYPPQTIVVEMARENQTTGKGKNNSKPRYKSLEKAIKEFGSQILKEHPTDNQELKNNRLYLYYLQNGKDMYTGQELDIHNLSNYDIDHIVPQSFITDNSIDNLVLTSSAGNREKGGDVPPLEIVRKRKVFWEKLYQGNLMSKRKFDYLTKAERGGLTEADKARFIHRQLVETRQITKNVANILHQRFNKETDNHGNTMEQVRIVTLKSALVSQFRKQFQLYKVREVNDYHHAHDAYLNGVVANTLLKVYPQLEPEFVYGEYHQFDWFKANKATAKKQFYTNIMLFFAQKERIIDENGEILWDKKYLETIKKVLDYRQMNIVKKTEIQKGEFSKATIKPKGNSSKLIPRKENWDPMKYGGLDSPNMAYAVIIEHAKGKKRIVIEKKLIQINIMERKMFEKDEEAFLEEKGYRHPKVLTKLPKYTLYECEKGRRRMLASANEAQKGNQLVLSNHLVSLLYHAKNCEASDGKSLKYIEAHRETFSELLAQVSEFATRYTLADANLSKINNLFEQNKEGDIKAIAQSFVDLMAFNAMGAPASFKFFEATIDRKRYTNLKELLSSTIIYQSITGLYESRKRLDD

SEQ ID NO: 247 - protein, 1327 aa, Listeria monocytogenes
MKKPYTIGLDIGTNSVGWAVLTDQYDLVKRKMKISGDSEKKQIKKNFWGVRLFEKGETAAKRRMSRTARRRIERRRNRISYLQEIFAIQMNEVDDNFFNRLKESFYAESDKKYNRHPFFGTVEEEVAYYKDFPTIYHLRKELIDSQKKADLRLVYLALAHIIKYRGHFLIEGALDTKNTSIDEMFKQFLQIYNQVFANDIEKTEKNQEVAQILAEKFTRKDKLDKILSLYPGEKTTGVFAQFVNIIVGSTGKFKKHFNLHEKKDINCAEDTYDTDLESLLAIIGDEFAEVFVAAKNAYNAVVLSNIITVTDSTTRAKLSASLIERFENHKEDLKKMKRFVRTYLPEKYDEIFDDTEKHGYAGYISGTKQADFYKYMKATLEKIEGADYFIAKIEEENFLRKQRTFDNGVIPHQLHLEELEAILHQQAKYYPFLREDYEKIKSLVTFRIPYFVGPLAKGQSEFAWLTRKADGEIRPWNIEEKVDFGKSAVDFIEKMTNKDTYLPKENVLPKHSLCYQKYMVYNELTKVRYIDDQGKTNYFSGQEKQQIFNDLFKQKRKVKKKDLELFLRNINQIESPTIEGLEDSFNASYATYHDLLKVGMKQEILDNPLNTEMLEDIVKILTVFEDKRMIKEQLQQFSDVLDGTVLKKLERRHYTGWGRLSAKLLVGIRDKQSHLTILDYLMDDGLNRNLMQLINDSNLSFKSIIEKEQVSTADKDLQSIVADLAGSPAIKKGILQSLKIVDELVSVMGYPPQTIVVEMARENQTTNKGKNNSKPRYKSLEKAIKEFGSQILKEHPTDNQELKNNRLYLYYLQNGKDMYTGQELDIHNLSNYDIDHIVPQSFITDNSVDNLVLTSSAGNREKGDNVPPLEIVQKRKIFWEKLYQGNLMSKRKFDYLTKAERGGLTEADKARFIHRQLVETRQITKNVANILHQRFNYKTDGNKDTMETVRIVTLKSALVSQFRKQFQFYKVREVNDYHHAHDAYLNGVVANTLLKVYPQLEPEFVYGEYHQFDWFKANKATAKKQFYTNIMLFFAQKDRIIDENGEILWDKRYLETVKKVLGYRQMNIVKKTEIQKGEFSNVTPNPKGKSNKLIPRKKDWDPIKYGGFDGSKMAYAIIIEYEKQKRKVRIEKKLIQINIMEREAFEKDEKTFLEEKGYHQPKVLIKVPKYTLYECENGRRRMLGSANEAHKGNQMLLPNHLMALLYHAEKYEAIDGESLAYIEVHRALFDELLAYISEFARKYTLSNDRLDEINMLYERNKDGDVKSIAESFVSLKKFNAFGVHQDFSFFGTKIERKRDRKLNELLNSTIIYQSITGLYESRKRLDN

SEQ ID NO: 248 - protein, 1327 aa, Listeria monocytogenes
MKNPYTIGLDIGTNSVGWAVLTNQYDLVKRKMKVAGNSDKKQIKKNFWGVRLFDDGQTAVDRRMNRTARRRIERRRNRISYLQEIFAVEMANIDANFFCRLNDSFYVDSEKRNSRHPFFATIEEEVAYHKNYRTIYHLREELVNSSEKADLRLVYLALAHIIKYRGNFLIEGALDTKNTSVDGVYEQFIQTYNQVFMSNIEKVEENIEVANILARKFTRREKFERILQLYPGEKSTGMFAQFISLIVGSKGNFQKVFDLIEKTDIECAKDSYEEDLETLLAIIGDEYAELFVAAKNTYNAVVLSSIITVTDTETNAKLSASMIERFDAHEKDLVELKAFIKLNLPKQYEEIFSNAAIDGYAGYIDGTKQVDFYKYLKTILENIEGADYFIAKIEEENFLRKQRTFDNGAIPHQLHLEELEAIIHQQAKYYPFLREDYEKIKSLVTFRIPYFVGPLAKGQSEFAWLTRKADGEIRPWNIEEKVDFGKSAVDFIEKMTNKDTYLPKENVLPKHSLCYQKYMVYNELTKIRYIDDQGKTNYFSGQEKQQIFNDLFKQKRKVKKKDLELFLRNINHVESPTIEGLEDSFNASYATYHDLMKVGIKQEILDNPLNTEMLEDIVKILTVFEDKRMIKEQLQQFSDVLDGTVLKKLERRHYTGWGRLSAKLLVGIRDKQSHLTILDYLMDDGLNRNLMQLINDSNLSFKSIIEKEQVSTADKDLQSIVADLAGSPAIKKGILQSLKVVEELVSVMGYPPQTIVVEMARENQTTNKGKNNSKPRYKSLEKAIKEFGSQILKEHPTDNQELKNNRLYLYYLQNGKDMYTGQELDIHNLSNYDIDHIVPQSFITDNSIDNLVLTSSAGNREKGDNVPPLEIVQKRKIFWEKLYQGNLMSKRKFDYLTKAERGGLTEADKARFIHRQLVETRQITKNVANILHQRFNYKTDDNEDTMEPVRIVTLKSALVSQFRKQFQLYKVREVNDYHHAHDAYLNGVVANTLLKVYPQLEPEFVYGEYHQFDWFKANKATAKKQFYTNIMLFFAQKERIIDENGEILWDKKYLETIKKVLNYRQMNIVKKTEIQKGEFSNQNPKPRGDSSKLIPKKTNLNPIKYGGFEGSNMAYAIIIEHEKRKKKVTIEKKLIQINIMERKAFEKDEKVFLEGKGYHQPKVLTKLPKYALYECENGRRRMLGSANEVHKGNQMLLPNHLMTLLYHAEKREAIDGESLAYIEAHKAVFGELLAHISEFARKYTLANDKLDEINMLYERNKDGDVKSIAESFVSLKKFNAFGVHKDFNFFGTTIKRKRDRKLKELLNSTIIYQSITGLYESRKRLDS

SEQ ID NO: 249 - protein, 1327 aa, Listeria monocytogenes; identical to SEQ ID NO: 244

SEQ ID NO: 250 - protein, 1327 aa, Listeria monocytogenes; identical to SEQ ID NO: 248

SEQ ID NO: 251 - protein, 781 aa, Listeria monocytogenes FSL F2-208
  misc_feature (721)..(721): Xaa can be any naturally occurring amino acid
IFNDLFKQKRKVKKKDLELFLRNINQIESPTIEGLEDSFNASYATYHDLLKVGMKQEILDNPLNTEMLEDIVKILTVFEDKRMIKEQLQQFSDVLDGVVLKKLERRHYTGWGRLSAKLLVGIRDKQSHLTILEYLMDDGLNRNLMQLINDSNLSFKSIIEKEQVSTTDKDLQSIVADLAGSPAIKKGILQSLKIVDELVSIMGYPPQTIVVEMARENQTTVKGKNNSRPRYKSLEKAIKEFGSQILKEHPTDNQELKNNRLYLYYLQNGKDIYTGQELDIHNLSNYDIDHIVPQSFITDNSIDNLVLTSSAGNREKGDDVPPLEIVRKRKVFWEKLYQGNLMSKRKFDYLTKAERGGLTEADKARFIHRQLVETRQITKNVANILHQRFNNETDNHGNTMEQVRIVTLKSALVSQFRKQFQLYKVREVNDYHHAHDAYLNGVVANTLLKVYPQLEPEFVYGEYHQFDWFKANKATAKKQFYTNIMLFFAQKERIIDENGEILWDKKYLETIKKVLDYRQMNIVKKTEIQKGEFSKATIKPKGNSSKLIPRKENWDPMKYGGLDSPNMAYAVIIEHAKGKKKIVIEKKLIQINIMERKMFEKDEEAFLEEKGYRHPKVLTKLPKYTLYECEKGRRRMLASANEAQKGNQLVLSNHLVSLLYHAKNCEASDGKSLKYTEAHRETFSELLAQVSEFATRYTLADANLSKINNLFEQNKEGDIKXIAQSFVDLMVFNAMGAPASFKFFEATIDRKRYTNLKELLSSTIIYQSITGLYESRKRLDD

SEQ ID NO: 252 - protein, 1327 aa, Listeria seeligeri
MKKPYTIGLDIGTNSVGWAALTDQYDLVKRKMKVAGNSEKKQIKKNLWGVRLVDEGKTAAHRRVNRTTRRRIERRRNRISYLQEIFTAEMFEVDANFFYRLEDSFYIESEKRQSRHPFFATIEEEVAYHENYRTIYHLREKLVNSSDKADLRLVYLALAHIIKYRGNFLIEGKLDTKNTSVDEVFKQFIKTYNQVFASDIERIEENNEVAKIFSEKLTKREKLDKILNLYPNEKSTDLFAQFISLIIGSKGNFKKFFNLTEKTDIECAKDSYEEDLEVLLARVGDEYAEIFVAAKNAYNAVVLSSIITVSNTETKAKLSASMIERFDKHDKDLKRMKAFFKVRLPENFNEVFNDVEKDGYAGYIEGTKQEAFYKYMKKMLEHVEGADYFINQIEEENFLRKQRTFDNGAIPHQLHLEELEAILHQQAKYYPFLKVDYEKIKSLVTFRIPYFVGPLANGQSEFSWLTRKADGEIRPWNIEEKVDFGKSAIDFIEKMTNKDTYLPKENVLPKHSMCYQKYMVYNELTKIRYTDDQGKTHYFSGQEKQQIFNDLFKQKRKVKKKDLELFLYNMNHVESPTVEGVEDAFNSSFTTYHDLQKVGVPQEILDDPLNTEMLEEIIKILTVFEDKRMINERLQEFSNVLDEAVLKKLERRHYTGWGRLSAKLLIGIRDKESHLTILDYLMDDKHNRNLMQLINDSNLSFKSIIEKEQVSTADKDIQSIVADLAGSPAIKKGILQSLKIVDELVGIMGYPPQTIVVEMARENQTTGKGKNNSKPRFTSLEKAIKELGSQILKEHPTDNQGLKNDRLYLYYLQNGKDMYTGQELDIHNLSNYDIDHVVPQSFITDNSIDNRVLASSAANREKGDNVPSLEVVRKRKVYWEKLYQAKLMSKRKFDYLTKAERGGLTEADKARFIHRQLVETRQITKNVANILHQRFNCKKDESGNVIEQVRIVTLKAALVSQFRKQFQLYKVREVNDYHHAHDAYLNCVVANTLLKVYPQLEPEFVYGDYHQFDWFKANKATAKKQFYTNIMLFFAKKDRIIDENGEILWDKKYLDTIKKVLNYRQMNIVKKTEIQKGEFSNATANPKGNSSKLIPRKADWDPIKYGGFDGSNMAYAIVIEHEKRKKKTVIKKELIQINIMERTAFEKDQKEFLEGKGYRNPKVITKIPKYTLYECENGRRRMLGSANEAQKGNQMVLPNHLMTLLYHAKNCEASDGKSLAYIESHREMFAELLDSISEFASRYTLADANLEKINTIFEQNKSGDVKVIAQSFVNLLEFNAMGAPASFKYFETNIERKRYNNLKELLNATIIYQSITGLYEARKRLDD

SEQ ID NO: 253 - protein, 1359 aa, Artificial Sequence; identical to SEQ ID NO: 227
  Synthetic polypeptide

SEQ ID NO: 254 - protein, 1290 aa, Roseburia hominis
IVDYCIGLDLGTGSVGWAVVDMNHRLMKRNGKHLWGSRLFSNAETAATRRSSRSIRRRYNKRRERIRLLRAILQDMVLEKDPTFFIRLEHTSFLDEEDKAKYLGDNYNLFIDEDFNDYTYYHKYPTIYHLRKALCESTEKADPRLIYLALHHIVKYRGNFLYEGQKFNMDASNIEDKLSDVFTQFADFNNIPYEDDKKNLEILEILKKPLSKKAKVDEVMALISPEKEFKSAYKELVTGIAGNKMNVTKMILCESIKQGDSEIKLKFSDSNYDDQFSEVENDLGEYVEFIDSLHNIYSWVELQTIMGATHTDNASISEAMVSRYNKHHEDLQLLKKCIKDNVPKKYFDMFRNDSEKVKGYYNYINRKAPVDEFYKFVKKCIEKVDTPEAKQILHDIELENFLLKQNSRTNGSVPYQMQLDEMIKIIDNQAKYYPVLKEKREQLLSILTFRIPYYFGPLETSEHAWIKRLEGKENQRILPWNYQDTVDVDATAEGFIKRMRSYCTYFPDEEVLPKNSLIVSKYEVYNELNKIRVDDKLLEVDVKNDIYNELFMKNKTVTEKKLKNWLVNNQCCRKDAEIKGFQKENQFSTSLTPWIDFTNIFGKIDQSNFDLIEKIIYDLTVFEDKKIMKRRLKKKYALPDDKIKQILKLKYKDWSRLSKKLLDGIVADSVTVLDVLESRLNLMEIINDKELGYAQMIEEASSCPKDGKFTYEEVAKLAGSPALKRGIWQSLQIVEEITKVMKCRPKYIYIEFERSEEKERTESKIKKLENVYKDEQTSVLEELKGFDNTKKISSDSLFLYFTQLGKCMYSGKKLDIDSLDKYQIDHIVPQSLVKDDSFDNRVLVLPSENQRKLDDLVVPFDIRDKMYRFWKLLFDHELISPKKFYSLIKTEYTERDEERFINRQLVETRQITKNVTQIIEDHYSTTKVAAIRANLSHEFRVKNHIYKNRDINDYHHAHDAYIVALIGGFMRDRYPNMHDSKAVYSEYMKMFRNKNDQKGFVINSMNYPYEVDGKLIWNPDLINEIKKCFYYKDCYCTTKLDQKSGQMFNTVLPNDAHSAKGAVIPVNKNRKDVNKYGGFSGLQYVIAAIEGTKKKGKKLVKVRKLSGIPLYLKQADIKEQIEYVEKEEKLSDVKIIKNNIPLNQLIEIDGRQYLLTSECVNAMQLVLNEEQCKLIADIYNAIYKQDFDGLDNMLMIQLYLQLIDKLKTLYPIYMGIVEKFEKFVSISKEEKANVIQMLIIMHKGPQNGNIIYDDFNVGKRIGRLNGRTFYLNIEFISQSPTGIYTKKYKL

SEQ ID NO: 255 - protein, 1292 aa, Sharpea azabuensis
KDIRYSIGLDIGTNSVGWAVMDEHYELLKKGNHHMWGSRLFDAAEPAATRRASRSIRRRYNKRRERIRLLRDLLGDMVMEVDPTFFIRLLNVSFLDEEDKQKNLGDNYNLFIEKDFNDKTYYDKYPTIYHLRKELCENKEKADPRLIYLALHHIVKYRGNFLYEGQSFTMDNSDIEERLNSAIEKFMSINEFDNRIVSDINSMIAVLSKIYQRSKKADDLLKIMNPTKEEKAAYKEFTKALVGLKFNISKMILAQEVKKGDTDIVLEFSNANYDSTIDELQSELGEYIEFIEMLHNIYSWVELQAILGATHTDNPSISAAMVERYEEHKKDLRVLKKVIREELPDKYNEVFRKDNRKLHNYLGYIKYDTPVEEFYKYIKGLLAKVDTDEAREILERIDLEKFMLKQNSRTNGSIPYQMQKDEMIQIIDNQSVYYPQLKENRDKLISILEFRIPYYFGPLAHSEFAWIKKFEDKQKERILPWNYDQIVDIDATAEGFIERMKNTGTYFPDEPVMAKNSLTVSKFEVLNELNKIRINGKLIAVETKKELLSDLFMKNKTITDKKLKDWLVTHQYYDINEELKIEGYQKDLQFSTSLAPWIDFTKIFGEINASNYQLIEKIIYDISIFEDKKILKRRLKKVYQLDDLLVDKILKLNYTGWSRLSEKLLTGMTADKATVLFVLESNKNLMEIINDEKLGYKQIIEESNMQDIEGPFKYDEVKKLAGSPAIKRGIWQALLVVREITKFMKHEPSHIYIEFAREEQKVRKESKIAKLQKIYENLQTQVYESLKKEDAKKRMETDALYLYYLQMGKSMYSGKPLDIDKLSTYQIDHILPQSLIKDDSFDNRVLVLPEENQWKLDSETVPFEIRNKMIGFWQMLHENGLMSNKKFFSLIRTDFSDKDKERFINRQLVETRQIIKNVAVIINDHYTNTNIVTVRAELSHQFRERYKIYKNRDINDFHHAHDAYIACIVGQFMHQNFEHLDAKIIYGQYKKNYKKNYGFILNSMNHLQSDIDTGEVMWDPAKIGKIKSCFYYKDVYVTKKLEQNSGTLFNTVLPNDAHSEKGATVPLNKYRADVHKYGGFGNVQSIIVAIEGKKKKGKKLIDVRKLTSIPLHLKNAPVEEQLSYIASPEHEDLIDVRIVKEILKNQLIEIDGGLYYVTSEYVTARQLSLNEQSCKLISEIYAAMLKKRYEYLDEEEIFDLYLQLLQKMDTLYPAYKGIAKRFFDFKNIDVVEKCDVIQILIIMHAGPMNGNIMYDDFKFTNRIGRFTHKNIDLKTTFISTSVTGLFSKKYKL

SEQ ID NO: 256 - protein, 1359 aa, Artificial Sequence; identical to SEQ ID NO: 227
  Synthetic polypeptide

SEQ ID NO: 257 - protein, 1359 aa, Artificial Sequence
  Synthetic polypeptide
MDKKYSIGLAIGTNSVGWAVITDEYKVPSKKFKVLGNTDRHSIKKNLIGALLFDSGETAEATRLKRTARRRYTRRKNRICYLQEIFSNEMAKVDDSFFHRLEESFLVEEDKKHERHPIFGNIVDEVAYHEKYPTIYHLRKKLVDSTDKADLRLIYLALAHMIKFRGHFLIEGDLNPDNSDVDKLFIQLVQTYNQLFEENINASGVDAKAILSARLSKSRRLENLIAQLPGEKKNGLFGNLIALSLGLTPNFKSNFDLAEDAKLQLSKDTYDDDLDNLLAQIGDQYADLFLAAKNLSDAILLSDILRVNTEITKAPLSASMIKRYDEHHQDLTLLKALVRQQLPEKYKEIFFDQSKNGYAGYIDGGASQEEFYKFIKPILEKMDGTEELLVKLNREDLLRKQRTFDNGSIPHQIHLGELHAILRRQEDFYPFLKDNREKIEKILTFRIPYYVGPLARGNSRFAWMTRKSEETITPWNFEEVVDKGASAQSFIERMTNFDKNLPNEKVLPKHSLLYEYFTVYNELTKVKYVTEGMRKPAFLSGEQKKAIVDLLFKTNRKVTVKQLKEDYFKKIECFDSVEISGVEDRFNASLGTYHDLLKIIKDKDFLDNEENEDILEDIVLTLTLFEDREMIEERLKTYAHLFDDKVMKQLKRRRYTGWGRLSRKLINGIRDKQSGKTILDFLKDGFANRNFMQLIHDDSLTFKEDIQKAQVSGQGDSLHEHIANLAGSPAIKKGILQTVKVVDELVKVMGRHKPENIVIEMARENQTTQKGQKNSRERMKRIEEGIKELGSQILKEHPVENTQLQNEKLYLYYLQNGRDMYVDQELDINRLSDYDVDAIVPQSFLKDDSIDNKVLTRSDKNRGKSDNVPSEEVVKKMKNYWRQLLNAKLITQRKFDNLTKAERGGLSELDKAGFIKRQLVETRQITKHVAQILDSRMNTKYDENDKLIREVKVITLKSKLVSDFRKDFQFYKVREINNYHHAHDAYLNAVVGTALIKKYPKLESEFVYGDYKVYDVSEQEIGKATAKYFFYSNIMNFFKTEITLANGEIRKRPLIETNGETGEIVWDKGRDFATVRKVLSMPQVNIVKKTEVQTGGFSKESILPKRNSDKLIARKKDWDPKKYGGFDSPTVAYSVLVVAKVEKGKSKKLKSVKELLGITIMERSSFEKNPIDFLEAKGYKEVKKDLIIKLPKYSLFELENGRKRMLASGELQKGNELALPSKYVNFLYLASHYEKLKGSPEDNEQKQLFVEQHKHYLDEIIEQISEFSKRVILADANLDKVLSAYNKHRDKPIREQAENIIHLFTLTNLGAPAAFKYFDTTIDRKRYTSTKEVLDATLIHQSITGLYETRIDLSQLGGD

SEQ ID NO: 258 - protein, 1359 aa, Artificial Sequence; identical to SEQ ID NO: 10
  Synthetic polypeptide

SEQ ID NO: 259 - protein, 1359 aa, Artificial Sequence; identical to SEQ ID NO: 257
  Synthetic polypeptide

SEQ ID NO: 260 - protein, 1388 aa, Streptococcus thermophilus
MTKPYSIGLDIGTNSVGWAVITDNYKVPSKKMKVLGNTSKKYIKKNLLGVLLFDSGITAEGRRLKRTARRRYTRRRNRILYLQEIFSTEMATLDDAFFQRLDDSFLVPDDKRDSKYPIFGNLVEEKAYHDEFPTIYHLRKYLADSTKKADLRLVYLALAHMIKYRGHFLIEGEFNSKNNDIQKNFQDFLDTYNAIFESDLSLENSKQLEEIVKDKISKLEKKDRILKLFPGEKNSGIFSEFLKLIVGNQADFRKCFNLDEKASLHFSKESYDEDLETLLGYIGDDYSDVFLKAKKLYDAILLSGFLTVTDNETEAPLSSAMIKRYNEHKEDLALLKEYIRNISLKTYNEVFKDDTKNGYAGYIDGKTNQEDFYVYLKNLLAEFEGADYFLEKIDREDFLRKQRTFDNGSIPYQIHLQEMRAILDKQAKFYPFLAKNKERIEKILTFRIPYYVGPLARGNSDFAWSIRKRNEKITPWNFEDVIDKESSAEAFINRMTSFDLYLPEEKVLPKHSLLYETFNVYNELTKVRFIAESMRDYQFLDSKQKKDIVRLYFKDKRKVTDKDIIEYLHAIYGYDGIELKGIEKQFNSSLSTYHDLLNIINDKEFLDDSSNEAIIEEIIHTLTIFEDREMIKQRLSKFENIFDKSVLKKLSRRHYTGWGKLSAKLINGIRDEKSGNTILDYLIDDGISNRNFMQLIHDDALSFKKKIQKAQIIGDEDKGNIKEVVKSLPGSPAIKKGILQSIKIVDELVKVMGGRKPESIVVEMARENQYTNQGKSNSQQRLKRLEKSLKELGSKILKENIPAKLSKIDNNALQNDRLYLYYLQNGKDMYTGDDLDIDRLSNYDIDHIIPQAFLKDNSIDNKVLVSSASNRGKSDDFPSLEVVKKRKTFWYQLLKSKLISQRKFDNLTKAERGGLLPEDKAGFIQRQLVETRQITKHVARLLDEKFNNKKDENNRAVRTVKIITLKSTLVSQFRKDFELYKVREINDFHHAHDAYLNAVIASALLKKYPKLEPEFVYGDYPKYNSFRERKSATEKVYFYSNIMNIFKKSISLADGRVIERPLIEVNEETGESVWNKESDLATVRRVLSYPQVNVVKKVEEQNHGLDRGKPKGLFNANLSSKPKPNSNENLVGAKEYLDPKKYGGYAGISNSFAVLVKGTIEKGAKKKITNVLEFQGISILDRINYRKDKLNFLLEKGYKDIELIIELPKYSLFELSDGSRRMLASILSTNNKRGEIHKGNQIFLSQKFVKLLYHAKRISNTINENHRKYVENHKKEFEELFYYILEFNENYVGAKKNGKLLNSAFQSWQNHSIDELCSSFIGPTGSERKGLFELTSRGSAADFEFLGVKIPRYRDYTPSSLLKDATLIHQSVTGLYETRIDLAKLGEG

SEQ ID NO: 261 - protein, 1056 aa, Staphylococcus aureus
GSHMKRNYILGLDIGITSVGYGIIDYETRDVIDAGVRLFKEANVENNEGRRSKRGARRLKRRRRHRIQRVKKLLFDYNLLTDHSELSGINPYEARVKGLSQKLSEEEFSAALLHLAKRRGVHNVNEVEEDTGNELSTKEQISRNSKALEEKYVAELQLERLKKDGEVRGSINRFKTSDYVKEAKQLLKVQKAYHQLDQSFIDTYIDLLETRRTYYEGPGEGSPFGWKDIKEWYEMLMGHCTYFPEELRSVKYAYNADLYNALNDLNNLVITRDENEKLEYYEKFQIIENVFKQKKKPTLKQIAKEILVNEEDIKGYRVTSTGKPEFTNLKVYHDIKDITARKEIIENAELLDQIAKILTIYQSSEDIQEELTNLNSELTQEEIEQISNLKGYTGTHNLSLKAINLILDELWHTNDNQIAIFNRLKLVPKKVDLSQQKEIPTTLVDDFILSPVVKRSFIQSIKVINAIIKKYGLPNDIIIELAREKNSKDAQKMINEMQKRNRQTNERIEEIIRTTGKENAKYLIEKIKLHDMQEGKCLYSLEAIPLEDLLNNPFNYEVDHIIPRSVSFDNSFNNKVLVKQEEASKKGNRTPFQYLSSSDSKISYETFKKHILNLAKGKGRISKTKKEYLLEERDINRFSVQKDFINRNLVDTRYATRGLMNLLRSYFRVNNLDVKVKSINGGFTSFLRRKWKFKKERNKGYKHHAEDALIIANADFIFKEWKKLDKAKKVMENQMFEEKQAESMPEIETEQEYKEIFITPHQIKHIKDFKDYKYSHRVDKKPNRELINDTLYSTRKDDKGNTLIVNNLNGLYDKDNDKLKKLINKSPEKLLMYHHDPQTYQKLKLIMEQYGDEKNPLYKYYEETGNYLTKYSKKDNGPVIKKIKYYGNKLNAHLDITDDYPNSRNKVVKLSLKPYRFDVYLDNGVYKFVTVKNLDVIKKENYYEVNSKAYEEAKKLKKISNQAEFIASFYNNDLIKINGELYRVIGVNNDLLNRIEVNMIDITYREYLENMNDKRPPRIIKTIASKTQSIKKYSTDILGNLYEVKSKKHPQIIKKG

SEQ ID NO: 262 - protein, 1368 aa, Artificial Sequence; identical to SEQ ID NO: 8
  Synthetic polypeptide

SEQ ID NO: 263 - protein, 198 aa, Homo sapiens [sequence omitted]

SEQ ID NO: 264 - protein, 198 aa, Mus musculus
MDSLLMKQKKFLYHFKNVRWAKGRHETYLCYVVKRRDSATSCSLDFGHLRNKSGCHVELLFLRYISDWDLDPGRCYRVTWFTSWSPCYDCARHVAEFLRWNPNLSLRIFTARLYFCEDRKAEPEGLRRLHRAGVQIGIMTFKDYFYCWNTFVENRERTFKAWEGLHENSVRLTRQLRRILLPLYEVDDLRDAFRMLGF

SEQ ID NO: 265 - protein, 198 aa, Canis lupus
MDSLLMKQRKFLYHFKNVRWAKGRHETYLCYVVKRRDSATSFSLDFGHLRNKSGCHVELLFLRYISDWDLDPGRCYRVTWFTSWSPCYDCARHVADFLRGYPNLSLRIFAARLYFCEDRKAEPEGLRRLHRAGVQIAIMTFKDYFYCWNTFVENREKTFKAWEGLHENSVRLSRQLRRILLPLYEVDDLRDAFRTLGL

SEQ ID NO: 266 - protein, 199 aa, Bos taurus
MDSLLKKQRQFLYQFKNVRWAKGRHETYLCYVVKRRDSPTSFSLDFGHLRNKAGCHVELLFLRYISDWDLDPGRCYRVTWFTSWSPCYDCARHVADFLRGYPNLSLRIFTARLYFCDKERKAEPEGLRRLHRAGVQIAIMTFKDYFYCWNTFVENHERTFKAWEGLHENSVRLSRQLRRILLPLYEVDDLRDAFRTLGL

SEQ ID NO: 267 - protein, 429 aa, Mus musculus
MGPFCLGCSHRKCYSPIRNLISQETFKFHFKNLGYAKGRKDTFLCYEVTRKDCDSPVSLHHGVFKNKDNIHAEICFLYWFHDKVLKVLSPREEFKITWYMSWSPCFECAEQIVRFLATHHNLSLDIFSSRLYNVQDPETQQNLCRLVQEGAQVAAMDLYEFKKCWKKFVDNGGRRFRPWKRLLTNFRYQDSKLQEILRPCYIPVPSSSSSTLSNICLTKGLPETRFCVEGRRMDPLSEEEFYSQFYNQRVKHLCYYHRMKPYLCYQLEQFNGQAPLKGCLLSEKGKQHAEILFLDKIRSMELSQVTITCYLTWSPCPNCAWQLAAFKRDRPDLILHIYTSRLYFHWKRPFQKGLCSLWQSGILVDVMDLPQFTDCWTNFVNPKRPFWPWKGLEIISRRTQRRLRRIKESWGLQDLVNDFGNLQLGPPMS

SEQ ID NO: 268 - protein, 429 aa, Rattus rattus
MGPFCLGCSHRKCYSPIRNLISQETFKFHFKNLRYAIDRKDTFLCYEVTRKDCDSPVSLHHGVFKNKDNIHAEICFLYWFHDKVLKVLSPREEFKITWYMSWSPCFECAEQVLRFLATHHNLSLDIFSSRLYNIRDPENQQNLCRLVQEGAQVAAMDLYEFKKCWKKFVDNGGRRFRPWKKLLTNFRYQDSKLQEILRPCYIPVPSSSSSTLSNICLTKGLPETRFCVERRRVHLLSEEEFYSQFYNQRVKHLCYYHGVKPYLCYQLEQFNGQAPLKGCLLSEKGKQHAEILFLDKIRSMELSQVIITCYLTWSPCPNCAWQLAAFKRDRPDLILHIYTSRLYFHWKRPFQKGLCSLWQSGILVDVMDLPQFTDCWTNFVNPKRPFWPWKGLEIISRRTQRRLHRIKESWGLQDLVNDFGNLQLGPPMS

SEQ ID NO: 269 - protein, 370 aa, Macaca mulatta
MVEPMDPRTFVSNFNNRPILSGLNTVWLCCEVKTKDPSGPPLDAKIFQGKVYSKAKYHPEMRFLRWFHKWRQLHHDQEYKVTWYVSWSPCTRCANSVATFLAKDPKVTLTIFVARLYYFWKPDYQQALRILCQKRGGPHATMKIMNYNEFQDCWNKFVDGRGKPFKPRNNLPKHYTLLQATLGELLRHLMDPGTFTSNFNNKPWVSGQHETYLCYKVERLHNDTWVPLNQHRGFLRNQAPNIHGFPKGRHAELCFLDLIPFWKLDGQQYRVTCFTSWSPCFSCAQEMAKFISNNEHVSLCIFAARIYDDQGRYQEGLRALHRDGAKIAMMNYSEFEYCWDTFVDRQGRPFQPWDGLDEHSQALSGRLRAI

SEQ ID NO: 270 - protein, 384 aa, Pan troglodytes
MKPHFRNPVERMYQDTFSDNFYNRPILSHRNTVWLCYEVKTKGPSRPPLDAKIFRGQVYSKLKYHPEMRFFHWFSKWRKLHRDQEYEVTWYISWSPCTKCTRDVATFLAEDPKVTLTIFVARLYYFWDPDYQEALRSLCQKRDGPRATMKIMNYDEFQHCWSKFVYSQRELFEPWNNLPKYYILLHIMLGEILRHSMDPPTFTSNFNNELWVRGRHETYLCYEVERLHNDTWVLLNQRRGFLCNQAPHKHGFLEGRHAELCFLDVIPFWKLDLHQDYRVTCFTSWSPCFSCAQEMAKFISNNKHVSLCIFAARIYDDQGRCQEGLRTLAKAGAKISIMTYSEFKHCWDTFVDHQGCPFQPWDGLEEHSQALSGRLRAILQNQGN

SEQ ID NO: 271 - protein, 377 aa, Chlorocebus sabaeus
MNPQIRNMVEQMEPDIFVYYFNNRPILSGRNTVWLCYEVKTKDPSGPPLDANIFQGKLYPEAKDHPEMKFLHWFRKWRQLHRDQEYEVTWYVSWSPCTRCANSVATFLAEDPKVTLTIFVARLYYFWKPDYQQALRILCQERGGPHATMKIMNYNEFQHCWNEFVDGQGKPFKPRKNLPKHYTLLHATLGELLRHVMDPGTFTSNFNNKPWVSGQRETYLCYKVERSHNDTWVLLNQHRGFLRNQAPDRHGFPKGRHAELCFLDLIPFWKLDDQQYRVTCFTSWSPCFSCAQKMAKFISNNKHVSLCIFAARIYDDQGRCQEGLRTLHRDGAKIAVMNYSEFEYCWDTFVDRQGRPFQPWDGLDEHSQALSGRLRAI

SEQ ID NO: 272 - protein, 384 aa, Homo sapiens
MKPHFRNTVERMYRDTFSYNFYNRPILSRRNTVWLCYEVKTKGPSRPPLDAKIFRGQVYSELKYHPEMRFFHWFSKWRKLHRDQEYEVTWYISWSPCTKCTRDMATFLAEDPKVTLTIFVARLYYFWDPDYQEALRSLCQKRDGPRATMKIMNYDEFQHCWSKFVYSQRELFEPWNNLPKYYILLHIMLGEILRHSMDPPTFTFNFNNEPWVRGRHETYLCYEVERMHNDTWVLLNQRRGFLCNQAPHKHGFLEGRHAELCFLDVIPFWKLDLDQDYRVTCFTSWSPCFSCAQEMAKFISKNKHVSLCIFTARIYDDQGRCQEGLRTLAEAGAKISIMTYSEFKHCWDTFVDHQGCPFQPWDGLDEHSQDLSGRLRAILQNQEN

SEQ ID NO: 273 - protein, 373 aa, Homo sapiens
MKPHFRNTVERMYRDTFSYNFYNRPILSRRNTVWLCYEVKTKGPSRPRLDAKIFRGQVYSQPEHHAEMCFLSWFCGNQLPAYKCFQITWFVSWTPCPDCVAKLAEFLAEHPNVTLTISAARLYYYWERDYRRALCRLSQAGARVKIMDDEEFAYCWENFVYSEGQPFMPWYKFDDNYAFLHRTLKEILRNPMEAMYPHIFYFHFKNLRKAYGRNESWLCFTMEVVKHHSPVSWKRGVFRNQVDPETHCHAERCFLSWFCDDILSPNTNYEVTWYTSWSPCPECAGEVAEFLARHSNVNLTIFTARLYYFWDTDYQEGLRSLSQEGASVEIMGYKDFKYCWENFVYNDDEPFKPWKGLKYNFLFLDSKLQEILE

SEQ ID NO: 274 - protein, 382 aa, Homo sapiens
MNPQIRNPMERMYRDTFYDNFENEPILYGRSYTWLCYEVKIKRGRSNLLWDTGVFRGQVYFKPQYHAEMCFLSWFCGNQLPAYKCFQITWFVSWTPCPDCVAKLAEFLSEHPNVTLTISAARLYYYWERDYRRALCRLSQAGARVTIMDYEEFAYCWENFVYNEGQQFMPWYKFDENYAFLHRTLKEILRYLMDPDTFTFNFNNDPLVLRRRQTYLCYEVERLDNGTWVLMDQHMGFLCNEAKNLLCGFYGRHAELRFLDLVPSLQLDPAQIYRVTWFISWSPCFSWGCAGEVRAFLQENTHVRLRIFAARIYDYDPLYKEALQMLRDAGAQVSIMTYDEFEYCWDTFVYRQGCPFQPWDGLEEHSQALSGRLRAILQNQGN

SEQ ID NO: 275 - protein, 190 aa, Homo sapiens
MNPQIRNPMKAMYPGTFYFQFKNLWEANDRNETWLCFTVEGIKRRSVVSWKTGVFRNQVDSETHCHAERCFLSWFCDDILSPNTKYQVTWYTSWSPCPDCAGEVAEFLARHSNVNLTIFTARLYYFQYPCYQEGLRSLSQEGVAVEIMDYEDFKYCWENFVYNDNEPFKPWKGLKTNFRLLKRRLRESLQ

SEQ ID NO: 276 - protein, 199 aa, Homo sapiens
MEASPASGPRHLMDPHIFTSNFNNGIGRHKTYLCYEVERLDNGTSVKMDQHRGFLHNQAKNLLCGFYGRHAELRFLDLVPSLQLDPAQIYRVTWFISWSPCFSWGCAGEVRAFLQENTHVRLRIFAARIYDYDPLYKEALQMLRDAGAQVSIMTYDEFKHCWDTFVDHQGCPFQPWDGLDEHSQALSGRLRAILQNQGN

SEQ ID NO: 277 - protein, 200 aa, Homo sapiens
MALLTAETFRLQFNNKRRLRRPYYPRKALLCYQLTPQNGSTPTRGYFENKKKCHAEICFINEIKSMGLDETQCYQVTCYLTWSPCSSCAWELVDFIKAHDHLNLGIFASRLYYHWCKPQQKGLRLLCGSQVPVEVMGFPKFADCWENFVDHEKPLSFNPYKMLEELDKNSRAIKRRLERIKIPGVRAQGRYMDILCDAEV

SEQ ID NO: 278 - protein, 386 aa, Homo sapiens
MNPQIRNPMERMYRDTFYDNFENEPILYGRSYTWLCYEVKIKRGRSNLLWDTGVFRGPVLPKRQSNHRQEVYFRFENHAEMCFLSWFCGNRLPANRRFQITWFVSWNPCLPCVVKVTKFLAEHPNVTLTISAARLYYYRDRDWRWVLLRLHKAGARVKIMDYEDFAYCWENFVCNEGQPFMPWYKFDDNYASLHRTLKEILRNPMEAMYPHIFYFHFKNLLKACGRNESWLCFTMEVTKHHSAVFRKRGVFRNQVDPETHCHAERCFLSWFCDDILSPNTNYEVTWYTSWSPCPECAGEVAEFLARHSNVNLTIFTARLCYFWDTDYQEGLCSLSQEGASVKIMGYKDFVSCWKNFVYSDDEPFKPWKGLQTNFRLLKRRLREILQ

SEQ ID NO: 279 - protein, 236 aa, Homo sapiens
MTSEKGPSTGDPTLRRRIEPWEFDVFYDPRELRKEACLLYEIKWGMSRKIWRSSGKNTTNHVEVNFIKKFTSERDFHPSMSCSITWFLSWSPCWECSQAIREFLSRHPGVTLVIYVARLFWHMDQQNRQGLRDLVNSGVTIQIMRASEYYHCWRNFVNYPPGDEAHWPQYPPLWMMLYALELHCIILSLPPCLKISRRWQNHLTFFRLHLQNCHYQTIPPHILLATGLIHPSVAWR

SEQ ID NO: 280 - protein, 229 aa, Mus musculus
MSSETGPVAVDPTLRRRIEPHEFEVFFDPRELRKETCLLYEINWGGRHSVWRHTSQNTSNHVEVNFLEKFTTERYFRPNTRCSITWFLSWSPCGECSRAITEFLSRHPYVTLFIYIARLYHHTDQRNRQGLRDLISSGVTIQIMTEQEYCYCWRNFVNYPPSNEAYWPRYPHLWVKLYVLELYCIILGLPPCLKILRRKQPQLTFFTITLQTCHYQRIPPHLLWATGLK

SEQ ID NO: 281 - protein, 229 aa, Rattus rattus [sequence omitted]

SEQ ID NO: 282 - DNA, 4107 bp, Streptococcus pyogenes
atggataagaaatactcaataggcttagatatcggcacaaatagcgtcggatgggcggtgatcactgatgaatataaggttccgtctaaaaagttcaaggttctgggaaatacagaccgccacagtatcaaaaaaaatcttataggggctcttttatttgacagtggagagacagcggaagcgactcgtctcaaacggacagctcgtagaaggtatacacgtcggaagaatcgtatttgttatctacaggagattttttcaaatgagatggcgaaagtagatgatagtttctttcatcgacttgaagagtcttttttggtggaagaagacaagaagcatgaacgtcatcctatttttggaaatatagtagatgaagttgcttatcatgagaaatatccaactatctatcatctgcgaaaaaaattggtagattctactgataaagcggatttgcgcttaatctatttggccttagcgcatatgattaagtttcgtggtcattttttgattgagggagatttaaatcctgataatagtgatgtggacaaactatttatccagttggtacaaacctacaatcaattatttgaagaaaaccctattaacgcaagtggagtagatgctaaagcgattctttctgcacgattgagtaaatcaagacgattagaaaatctcattgctcagctccccggtgagaagaaaaatggcttatttgggaatctcattgctttgtcattgggtttgacccctaattttaaatcaaattttgatttggcagaagatgctaaattacagctttcaaaagatacttacgatgatgatttagataatttattggcgcaaattggagatcaatatgctgatttgtttttggcagctaagaatttatcagatgctattttactttcagatatcctaagagtaaatactgaaataactaaggctcccctatcagcttcaatgattaaacgctacgatgaacatcatcaagacttgactcttttaaaagctttagttcgacaacaacttccagaaaagtataaagaaatcttttttgatcaatcaaaaaacggatatgcaggttatattgatgggggagctagccaagaagaattttataaatttatcaaaccaattttagaaaaaatggatggtactgaggaattattggtgaaactaaatcgtgaagatttgctgcgcaagcaacggacctttgacaacggctctattccccatcaaattcacttgggtgagctgcatgctattttgagaagacaagaagacttttatccatttttaaaagacaatcgtgagaagattgaaaaaatcttgacttttcgaattccttattatgttggtccattggcgcgtggcaatagtcgttttgcatggatgactcggaagtctgaagaaacaattaccccatggaattttgaagaagttgtcgataaaggtgcttcagctcaatcatttattgaacgcatgacaaactttgataaaaatcttccaaatgaaaaagtactaccaaaacatagtttgctttatgagtattttacggtttataacgaattgacaaaggtcaaatatgttactgaaggaatgcgaaaaccagcatttctttcaggtgaacagaagaaagccattgttgatttactcttcaaaacaaatcgaaaagtaaccgttaagcaattaaaagaagattatttcaaaaaaatagaatgttttgatagtgttgaaatttcaggagttgaagatagatttaatgcttcattaggtacctaccatgatttgctaaaaattattaaagataaagattttttggataatgaagaaaatgaagatatcttagaggatattgttttaacattgaccttatttgaagatagggagatgattgaggaaagacttaaaacatatgctcacctctttgatgataaggtgatgaaacagcttaaacgtcgccgttatactggttggggacgtttgtctcgaaaattgattaatggtattagggataagcaatctggcaaaacaatattagattttttgaaatcagatggttttgccaatcgcaattttatgcagctgatccatgatgatagtttgacatttaaagaagacattcaaaaagcacaagtgtctggacaaggcgatagtttacatgaacatattgcaaatttagctggtagccctgctattaaaaaaggtattttacagactgtaaaagttgttgatgaattggtcaaagtaatggggcggcataagccagaaaatatcgttattgaaatggcacgtgaaaatcagacaactcaaaagggccagaaaaattcgcgagagcgtatgaaacgaatcgaagaaggtatcaaagaattaggaagtcagattcttaaagagcatcctgttgaaaatactcaattgcaaaatgaaaagctctatctctattatctccaaaatggaagagacatgtatgtggaccaagaattagatattaatcgtttaagtgattatgatgtcgatcacattgttccacaaagtttccttaaagacgattcaatagacaataaggtcttaacgcgttctgataaaaatcgtggtaaatcggataacgttccaagtgaagaagtagtcaaaaagatgaaaaactattggagacaacttctaaacgccaagttaatcactcaacgtaagtttgataatttaacgaaagctgaacgtggaggtttgagtgaacttgataaagctggttttatcaaacgccaattggttgaaactcgccaaatcactaagcatgtggcacaaattttggatagtcgcatgaatactaaatacgatgaaaatgataaacttattcgagaggttaaagtgattaccttaaaatctaaattagtttctgacttccgaaaagatttccaattctataaagtacgtgagattaacaattaccatcatgcccatgatgcgtatctaaatgccgtcgttggaactgctttgattaagaaatatccaaaacttgaatcggagtttgtctatggtgattataaagtttatgatgttcgtaaaatgattgctaagtctgagcaagaaataggcaaagcaaccgcaaaatatttcttttactctaatatcatgaacttcttcaaaacagaaattacacttgcaaatggagagattcgcaaacgccctctaatcgaaactaatggggaaactggagaaattgtctgggataaagggcgagattttgccacagtgcgcaaagtattgtccatgccccaagtcaatattgtcaagaaaacagaagtacagacaggcggattctccaaggagtcaattttaccaaaaagaaattcggacaagcttattgctcgtaaaaaagactgggatccaaaaaaatatggtggttttgatagtccaacggtagcttattcagtcctagtggttgctaaggtggaaaaagggaaatcgaagaagttaaaatccgttaaagagttactagggatcacaattatggaaagaagttcctttgaaaaaaatccgattgactttttagaagctaaaggatataaggaagttaaaaaagacttaatcattaaactacctaaatatagtctttttgagttagaaaacggtcgtaaacggatgctggctagtgccggagaattacaaaaaggaaatgagctggctctgccaagcaaatatgtgaattttttatatttagctagtcattatgaaaagttgaagggtagtccagaagataacgaacaaaaacaattgtttgtggagcagcataagcattatttagatgagattattgagcaaatcagtgaattttctaagcgtgttattttagcagatgccaatttagataaagttcttagtgcatataacaaacatagagacaaaccaatacgtgaacaagcagaaaatattattcatttatttacgttgacgaatcttggagctcccgctgcttttaaatattttgatacaacaattgatcgtaaacgatatacgtctacaaaagaagttttagatgccactcttatccatcaatccatcactggtctttatgaaacacgcattgatttgagtcagctaggaggtgactga

SEQ ID NO: 283 - protein, 36 aa, Artificial Sequence
  Synthetic polypeptide
  misc_feature (2)..(2): Xaa can be any naturally occurring amino acid
  misc_feature (4)..(23): Xaa can be any naturally occurring amino acid
  misc_feature (24)..(26): Xaa can be any naturally occurring amino acid
  misc_feature (27)..(29): Xaa can be any naturally occurring amino acid
  misc_feature (32)..(32): Xaa can be any naturally occurring amino acid
  misc_feature (33)..(35): Xaa can be any naturally occurring amino acid
HXEXXXXXXXXXXXXXXXXXXXXXXXXXXPCXXXXC

SEQ ID NO: 284 - protein, 11 aa, Artificial Sequence
  Synthetic polypeptide
SPKKKRKVEAS

SEQ ID NO: 285 - RNA, 82 nt, Artificial Sequence
  Synthetic polynucleotide
guuuuagagcuagaaauagcaaguuaaaauaaaggcuaguccguuaucaacuugaaaaaguggcaccgagucggugcuuuuu

SEQ ID NO: 286 - DNA, 20 bp, Artificial Sequence
  Synthetic polynucleotide
aagagagacagtacatgccc

SEQ ID NO: 287 - DNA, 20 bp, Artificial Sequence
  Synthetic polynucleotide
ggagcccaccgagtacctgg

SEQ ID NO: 288 - DNA, 20 bp, Artificial Sequence
  Synthetic polynucleotide
agtctcctcagcaaaacgaa

SEQ ID NO: 289 - DNA, 20 bp, Artificial Sequence
  Synthetic polynucleotide
gaccccctccaccccgcctc

SEQ ID NO: 290 - DNA, 23 bp, Artificial Sequence
  Synthetic polynucleotide
  misc_feature (21)..(23): n is a, c, g, or t
aagagagacagtacatgcccnnn

SEQ ID NO: 291 - DNA, 23 bp, Artificial Sequence
  Synthetic polynucleotide
  misc_feature (21)..(21): n is a, c, g, or t
aagagagacagtacatgcccngg

SEQ ID NO: 292 - DNA, 189 bp, Artificial Sequence
  Synthetic polynucleotide
gaggccagcggttccggacgggctgacgcattggacgattttgatctggatatgctgggaagtgacgccctcgatgattttgaccttgacatgcttggttcggatgcccttgatgactttgacctcgacatgctcggcagtgacgcccttgatgatttcgacctggacatgctgattaactctagatag

SEQ ID NO: 293 - protein, 62 aa, Artificial Sequence
  Synthetic polypeptide
EASGSGRADALDDFDLDMLGSDALDDFDLDMLGSDALDDFDLDMLGSDALDDFDLDMLINSR

SEQ ID NO: 294 - DNA, 1662 bp, Artificial Sequence
  Synthetic polynucleotide
tcgccagggatccgtcgacttgacgcgttgatatcaacaagtttgtacaaaaaagcaggctacaaagaggccagcggttccggacgggctgacgcattggacgattttgatctggatatgctgggaagtgacgccctcgatgattttgaccttgacatgcttggttcggatgcccttgatgactttgacctcgacatgctcggcagtgacgcccttgatgatttcgacctggacatgctgattaactctagaagttccggatctccgaaaaagaaacgcaaagttggtagccagtacctgcccgacaccgacgaccggcaccggatcgaggaaaagcggaagcggacctacgagacattcaagagcatcatgaagaagtcccccttcagcggccccaccgaccctagacctccacctagaagaatcgccgtgcccagcagatccagcgccagcgtgccaaaacctgccccccagccttaccccttcaccagcagcctgagcaccatcaactacgacgagttccctaccatggtgttccccagcggccagatctctcaggcctctgctctggctccagcccctcctcaggtgctgcctcaggctcctgctcctgcaccagctccagccatggtgtctgcactggctcaggcaccagcacccgtgcctgtgctggctcctggacctccacaggctgtggctccaccagcccctaaacctacacaggccggcgagggcacactgtctgaagctctgctgcagctgcagttcgacgacgaggatctgggagccctgctgggaaacagcaccgatcctgccgtgttcaccgacctggccagcgtggacaacagcgagttccagcagctgctgaaccagggcatccctgtggcccctcacaccaccgagcccatgctgatggaataccccgaggccatcacccggctcgtgacaggcgctcagaggcctcctgatccagctcctgcccctctgggagcaccaggcctgcctaatggactgctgtctggcgacgaggacttcagctctatcgccgatatggatttctcagccttgctgggctctggcagcggcagccgggattccagggaagggatgtttttgccgaagcctgaggccggctccgctattagtgacgtgtttgagggccgcgaggtgtgccagccaaaacgaatccggccatttcatcctccaggaagtccatgggccaaccgcccactccccgccagcctcgcaccaacaccaaccggtccagtacatgagccagtcgggtcactgaccccggcaccagtccctcagccactggatccagcgcccgcagtgactcccgaggccagtcacctgttggaggatcccgatgaagagacgagccaggctgtcaaagcccttcgggagatggccgatactgtgattccccagaaggaagaggctgcaatctgtggccaaatggacctttcccatccgcccccaaggggccatctggatgagctgacaaccacacttgagtccatgaccgaggatctgaacctggactcacccctgaccccggaattgaacgagattctggataccttcctgaacgacgagtgcctcttgcatgccatgcatatcagcacaggactgtccatcttcgacacatctctgttttga

SEQ ID NO: 295 - protein, 553 aa, Artificial Sequence
  Synthetic polypeptide
SPGIRRLDALISTSLYKKAGYKEASGSGRADALDDFDLDMLGSDALDDFDLDMLGSDALDDFDLDMLGSDALDDFDLDMLINSRSSGSPKKKRKVGSQYLPDTDDRHRIEEKRKRTYETFKSIMKKSPFSGPTDPRPPPRRIAVPSRSSASVPKPAPQPYPFTSSLSTINYDEFPTMVFPSGQISQASALAPAPPQVLPQAPAPAPAPAMVSALAQAPAPVPVLAPGPPQAVAPPAPKPTQAGEGTLSEALLQLQFDDEDLGALLGNSTDPAVFTDLASVDNSEFQQLLNQGIPVAPHTTEPMLMEYPEAITRLVTGAQRPPDPAPAPLGAPGLPNGLLSGDEDFSSIADMDFSALLGSGSGSRDSREGMFLPKPEAGSAISDVFEGREVCQPKRIRPFHPPGSPWANRPLPASLAPTPTGPVHEPVGSLTPAPVPQPLDPAPAVTPEASHLLEDPDEETSQAVKALREMADTVIPQKEEAAICGQMDLSHPPPRGHLDELTTTLESMTEDLNLDSPLTPELNEILDTFLNDECLLHAMHISTGLSIFDTSLF

SEQ ID NO: 296 - skipped

SEQ ID NO: 297 - protein, 1367 aa, Artificial Sequence; identical to SEQ ID NO: 2
  Synthetic polypeptide

SEQ ID NO: 298 - protein, 1368 aa, Artificial Sequence; identical to SEQ ID NO: 4
  Synthetic polypeptide

SEQ ID NO: 299 - protein, 7 aa, Artificial Sequence
  Synthetic polypeptide
PKKKRKV

SEQ ID NO: 300 - protein, 30 aa, Artificial Sequence
  Synthetic polypeptide
MDSLLMNRRKFLYQFKNVRWAKGRRETYLC

SEQ ID NO: 301 - protein, 1368 aa, Artificial Sequence; identical to SEQ ID NO: 4
  Synthetic polypeptide

SEQ ID NO: 302 - protein, 1368 aa, Artificial Sequence
  Synthetic polypeptide
MDKKYSIGLDIGTNSVGWAVITDEYKVPSKKFKVLGNTDRHSIKKNLIGALLFDSGETAEATRLKRTARRRYTRRKNRICYLQEIFSNEMAKVDDSFFHRLEESFLVEEDKKHERHPIFGNIVDEVAYHEKYPTIYHLRKKLVDSTDKADLRLIYLALAHMIKFRGHFLIEGDLNPDNSDVDKLFIQLVQTYNQLFEENPINASGVDAKAILSARLSKSRRLENLIAQLPGEKKNGLFGNLIALSLGLTPNFKSNFDLAEDAKLQLSKDTYDDDLDNLLAQIGDQYADLFLAAKNLSDAILLSDILRVNTEITKAPLSASMIKRYDEHHQDLTLLKALVRQQLPEKYKEIFFDQSKNGYAGYIDGGASQEEFYKFIKPILEKMDGTEELLVKLNREDLLRKQRTFDNGSIPHQIHLGELHAILRRQEDFYPFLKDNREKIEKILTFRIPYYVGPLARGNSRFAWMTRKSEETITPWNFEEVVDKGASAQSFIERMTNFDKNLPNEKVLPKHSLLYEYFTVYNELTKVKYVTEGMRKPAFLSGEQKKAIVDLLFKTNRKVTVKQLKEDYFKKIECFDSVEISGVEDRFNASLGTYHDLLKIIKDKDFLDNEENEDILEDIVLTLTLFEDREMIEERLKTYAHLFDDKVMKQLKRRRYTGWGRLSRKLINGIRDKQSGKTILDFLKSDGFANRNFMQLIHDDSLTFKEDIQKAQVSGQGDSLHEHIANLAGSPAIKKGILQTVKVVDELVKVMGRHKPENIVIEMARENQTTQKGQKNSRERMKRIEEGIKELGSQILKEHPVENTQLQNEKLYLYYLQNGRDMYVDQELDINRLSDYDVDAIVPQSFLKDDSIDNKVLTRSDKNRGKSDNVPSEEVVKKMKNYWRQLLNAKLITQRKFDNLTKAERGGLSELDKAGFIKRQLVETRQITKHVAQILDSRMNTKYDENDKLIREVKVITLKSKLVSDFRKDFQFYKVREINNYHHAHDAYLNAVVGTALIKKYPKLESEFVYGDYKVYDVRKMIAKSEQEIGKATAKYFFYSNIMNFFKTEITLANGEIRKRPLIETNGETGEIVWDKGRDFATVRKVLSMPQVNIVKKTEVQTGGFSKESILPKRNSDKLIARKKDWDPKKYGGFDSPTVAYSVLVVAKVEKGKSKKLKSVKELLGITIMERSSFEKNPIDFLEAKGYKEVKKDLIIKLPKYSLFELENGRKRMLASAGELQKGNELALPSKYVNFLYLASHYEKLKGSPEDNEQKQLFVEQHKHYLDEIIEQISEFSKRVILADANLDKVLSAYNKHRDKPIREQAENIIHLFTLTNLGAPAAFKYFDTTIDRKRYTSTKEVLDATLIHQSITGLYETRIDLSQLGGD

SEQ ID NO: 303 - protein, 181 aa, Erwinia tasmaniensis
MASRGVNKVILVGNLGQDPEVRYMPNGGAVANITLATSESWRDKQTGETKEKTEWHRVVLFGKLAEVAGEYLRKGSQVYIEGALQTRKWTDQAGVEKYTTEVVVNVGGTMQMLGGRSQGGGASAGGQNGGSNNGWGQPQQPQGGNQFSGGAQQQARPQQQPQQNNAPANNEPPIDFDDDIP

SEQ ID NO: 304 - protein, 209 aa, Artificial Sequence
  Synthetic Polypeptide
MAGAQDFVPHTADLAELAAAAGECRGCGLYRDATQAVFGAGGRSARIMMIGEQPGDKEDLAGLPFVGPAGRLLDRALEAADIDRDALYVTNAVKHFKFTRAAGGKRRIHKTPSRTEVVACRPWLIAEMTSVEPDVVVLLGATAAKALLGNDFRVTQHRGEVLHVDDVPGDPALVATVHPSSLLRGPKEERESAFAGLVDDLRVAADVRP

SEQ ID NO: 305 - protein, 313 aa, Artificial Sequence
  Synthetic Polypeptide
MIGQKTLYSFFSPSPARKRHAPSPEPAVQGTGVAGVPEESGDAAAIPAKKAPAGQEEPGTPPSSPLSAEQLDRIQRNKAAALLRLAARNVPVGFGESWKKHLSGEFGKPYFIKLMGFVAEERKHYTVYPPPHQVFTWTQMCDIKDVKVVILGQEPYHGPNQAHGLCFSVQRPVPPPPSLENIYKELSTDIEDFVHPGHGDLSGWAKQGVLLLNAVLTVRAHQANSHKERGWEQFTDAVVSWLNQNSNGLVFLLWGSYAQKKGSAIDRKRHHVLQTAHPSPLSVYRGFFGCRHFSKTNELLQKSGKKPIDWKEL

SEQ ID NO: 306 - protein, 1368 aa, Streptococcus pyogenes
MDKKYSIGLDIGTNSVGWAVITDEYKVPSKKFKVLGNTDRHSIKKNLIGALLFDSGETAEATRLKRTARRRYTRRKNRICYLQEIFSNEMAKVDDSFFHRLEESFLVEEDKKHERHPIFGNIVDEVAYHEKYPTIYHLRKKLVDSTDKADLRLIYLALAHMIKFRGHFLIEGDLNPDNSDVDKLFIQLVQTYNQLFEENPINASGVDAKAILSARLSKSRRLENLIAQLPGEKKNGLFGNLIALSLGLTPNFKSNFDLAEDAKLQLSKDTYDDDLDNLLAQIGDQYADLFLAAKNLSDAILLSDILRVNTEITKAPLSASMIKRYDEHHQDLTLLKALVRQQLPEKYKEIFFDQSKNGYAGYIDGGASQEEFYKFIKPILEKMDGTEELLVKLNREDLLRKQRTFDNGSIPHQIHLGELHAILRRQEDFYPFLKDNREKIEKILTFRIPYYVGPLARGNSRFAWMTRKSEETITPWNFEEVVDKGASAQSFIERMTAFDKNLPNEKVLPKHSLLYEYFTVYNELTKVKYVTEGMRKPAFLSGEQKKAIVDLLFKTNRKVTVKQLKEDYFKKIECFDSVEISGVEDRFNASLGTYHDLLKIIKDKDFLDNEENEDILEDIVLTLTLFEDREMIEERLKTYAHLFDDKVMKQLKRRRYTGWGALSRKLINGIRDKQSGKTILDFLKSDGFANRNFMALIHDDSLTFKEDIQKAQVSGQGDSLHEHIANLAGSPAIKKGILQTVKVVDELVKVMGRHKPENIVIEMARENQTTQKGQKNSRERMKRIEEGIKELGSQILKEHPVENTQLQNEKLYLYYLQNGRDMYVDQELDINRLSDYDVDHIVPQSFLKDDSIDNKVLTRSDKNRGKSDNVPSEEVVKKMKNYWRQLLNAKLITQRKFDNLTKAERGGLSELDKAGFIKRQLVETRAITKHVAQILDSRMNTKYDENDKLIREVKVITLKSKLVSDFRKDFQFYKVREINNYHHAHDAYLNAVVGTALIKKYPKLESEFVYGDYKVYDVRKMIAKSEQEIGKATAKYFFYSNIMNFFKTEITLANGEIRKRPLIETNGETGEIVWDKGRDFATVRKVLSMPQVNIVKKTEVQTGGFSKESILPKRNSDKLIARKKDWDPKKYGGFDSPTVAYSVLVVAKVEKGKSKKLKSVKELLGITIMERSSFEKNPIDFLEAKGYKEVKKDLIIKLPKYSLFELENGRKRMLASAGELQKGNELALPSKYVNFLYLASHYEKLKGSPEDNEQKQLFVEQHKHYLDEIIEQISEFSKRVILADANLDKVLSAYNKHRDKPIREQAENIIHLFTLTNLGAPAAFKYFDTTIDRKRYTSTKEVLDATLIHQSITGLYETRIDLSQLGGD

SEQ ID NO: 307 - protein, 1052 aa, Staphylococcus aureus
KRNYILGLDIGITSVGYGIIDYETRDVIDAGVRLFKEANVENNEGRRSKRGARRLKRRRRHRIQRVKKLLFDYNLLTDHSELSGINPYEARVKGLSQKLSEEEFSAALLHLAKRRGVHNVNEVEEDTGNELSTKEQISRNSKALEEKYVAELQLERLKKDGEVRGSINRFKTSDYVKEAKQLLKVQKAYHQLDQSFIDTYIDLLETRRTYYEGPGEGSPFGWKDIKEWYEMLMGHCTYFPEELRSVKYAYNADLYNALNDLNNLVITRDENEKLEYYEKFQIIENVFKQKKKPTLKQIAKEILVNEEDIKGYRVTSTGKPEFTNLKVYHDIKDITARKEIIENAELLDQIAKILTIYQSSEDIQEELTNLNSELTQEEIEQISNLKGYTGTHNLSLKAINLILDELWHTNDNQIAIFNRLKLVPKKVDLSQQKEIPTTLVDDFILSPVVKRSFIQSIKVINAIIKKYGLPNDIIIELAREKNSKDAQKMINEMQKRNRQTNERIEEIIRTTGKENAKYLIEKIKLHDMQEGKCLYSLEAIPLEDLLNNPFNYEVDHIIPRSVSFDNSFNNKVLVKQEENSKKGNRTPFQYLSSSDSKISYETFKKHILNLAKGKGRISKTKKEYLLEERDINRFSVQKDFINRNLVDTRYATRGLMNLLRSYFRVNNLDVKVKSINGGFTSFLRRKWKFKKERNKGYKHHAEDALIIANADFIFKEWKKLDKAKKVMENQMFEEKQAESMPEIETEQEYKEIFITPHQIKHIKDFKDYKYSHRVDKKPNRELINDTLYSTRKDDKGNTLIVNNLNGLYDKDNDKLKKLINKSPEKLLMYHHDPQTYQKLKLIMEQYGDEKNPLYKYYEETGNYLTKYSKKDNGPVIKKIKYYGNKLNAHLDITDDYPNSRNKVVKLSLKPYRFDVYLDNGVYKFVTVKNLDVIKKENYYEVNSKCYEEAKKLKKISNQAEFIASFYNNDLIKINGELYRVIGVNNDLLNRIEVNMIDITYREYLENMNDKRPPRIIKTIASKTQSIKKYSTDILGNLYEVKSKKHPQIIKKG

SEQ ID NO: 308 - protein, 1052 aa, Staphylococcus aureus
KRNYILGLDIGITSVGYGIIDYETRDVIDAGVRLFKEANVENNEGRRSKRGARRLKRRRRHRIQRVKKLLFDYNLLTDHSELSGINPYEARVKGLSQKLSEEEFSAALLHLAKRRGVHNVNEVEEDTGNELSTKEQISRNSKALEEKYVAELQLERLKKDGEVRGSINRFKTSDYVKEAKQLLKVQKAYHQLDQSFIDTYIDLLETRRTYYEGPGEGSPFGWKDIKEWYEMLMGHCTYFPEELRSVKYAYNADLYNALNDLNNLVITRDENEKLEYYEKFQIIENVFKQKKKPTLKQIAKEILVNEEDIKGYRVTSTGKPEFTNLKVYHDIKDITARKEIIENAELLDQIAKILTIYQSSEDIQEELTNLNSELTQEEIEQISNLKGYTGTHNLSLKAINLILDELWHTNDNQIAIFNRLKLVPKKVDLSQQKEIPTTLVDDFILSPVVKRSFIQSIKVINAIIKKYGLPNDIIIELAREKNSKDAQKMINEMQKRNRQTNERIEEIIRTTGKENAKYLIEKIKLHDMQEGKCLYSLEAIPLEDLLNNPFNYEVDHIIPRSVSFDNSFNNKVLVKQEEASKKGNRTPFQYLSSSDSKISYETFKKHILNLAKGKGRISKTKKEYLLEERDINRFSVQKDFINRNLVDTRYATRGLMNLLRSYFRVNNLDVKVKSINGGFTSFLRRKWKFKKERNKGYKHHAEDALIIANADFIFKEWKKLDKAKKVMENQMFEEKQAESMPEIETEQEYKEIFITPHQIKHIKDFKDYKYSHRVDKKPNRELINDTLYSTRKDDKGNTLIVNNLNGLYDKDNDKLKKLINKSPEKLLMYHHDPQTYQKLKLIMEQYGDEKNPLYKYYEETGNYLTKYSKKDNGPVIKKIKYYGNKLNAHLDITDDYPNSRNKVVKLSLKPYRFDVYLDNGVYKFVTVKNLDVIKKENYYEVNSKCYEEAKKLKKISNQAEFIASFYNNDLIKINGELYRVIGVNNDLLNRIEVNMIDITYREYLENMNDKRPPRIIKTIASKTQSIKKYSTDILGNLYEVKSKKHPQIIKKG

SEQ ID NO: 309 - protein, 1052 aa, Staphylococcus aureus
KRNYILGLDIGITSVGYGIIDYETRDVIDAGVRLFKEANVENNEGRRSKRGARRLKRRRRHRIQRVKKLLFDYNLLTDHSELSGINPYEARVKGLSQKLSEEEFSAALLHLAKRRGVHNVNEVEEDTGNELSTKEQISRNSKALEEKYVAELQLERLKKDGEVRGSINRFKTSDYVKEAKQLLKVQKAYHQLDQSFIDTYIDLLETRRTYYEGPGEGSPFGWKDIKEWYEMLMGHCTYFPEELRSVKYAYNADLYNALNDLNNLVITRDENEKLEYYEKFQIIENVFKQKKKPTLKQIAKEILVNEEDIKGYRVTSTGKPEFTNLKVYHDIKDITARKEIIENAELLDQIAKILTIYQSSEDIQEELTNLNSELTQEEIEQISNLKGYTGTHNLSLKAINLILDELWHTNDNQIAIFNRLKLVPKKVDLSQQKEIPTTLVDDFILSPVVKRSFIQSIKVINAIIKKYGLPNDIIIELAREKNSKDAQKMINEMQKRNRQTNERIEEIIRTTGKENAKYLIEKIKLHDMQEGKCLYSLEAIPLEDLLNNPFNYEVDHIIPRSVSFDNSFNNKVLVKQEEASKKGNRTPFQYLSSSDSKISYETFKKHILNLAKGKGRISKTKKEYLLEERDINRFSVQKDFINRNLVDTRYATRGLMNLLRSYFRVNNLDVKVKSINGGFTSFLRRKWKFKKERNKGYKHHAEDALIIANADFIFKEWKKLDKAKKVMENQMFEEKQAESMPEIETEQEYKEIFITPHQIKHIKDFKDYKYSHRVDKKPNRKLINDTLYSTRKDDKGNTLIVNNLNGLYDKDNDKLKKLINKSPEKLLMYHHDPQTYQKLKLIMEQYGDEKNPLYKYYEETGNYLTKYSKKDNGPVIKKIKYYGNKLNAHLDITDDYPNSRNKVVKLSLKPYRFDVYLDNGVYKFVTVKNLDVIKKENYYEVNSKCYEEAKKLKKISNQAEFIASFYKNDLIKINGELYRVIGVNNDLLNRIEVNMIDITYREYLENMNDKRPPHIIKTIASKTQSIKKYSTDILGNLYEVKSKKHPQIIKKG

SEQ ID NO: 310 - protein, 1367 aa, Streptococcus pyogenes
DKKYSIGLAIGTNSVGWAVITDEYKVPSKKFKVLGNTDRHSIKKNLIGALLFDSGETAEATRLKRTARRRYTRRKNRICYLQEIFSNEMAKVDDSFFHRLEESFLVEEDKKHERHPIFGNIVDEVAYHEKYPTIYHLRKKLVDSTDKADLRLIYLALAHMIKFRGHFLIEGDLNPDNSDVDKLFIQLVQTYNQLFEENPINASGVDAKAILSARLSKSRRLENLIAQLPGEKKNGLFGNLIALSLGLTPNFKSNFDLAEDAKLQLSKDTYDDDLDNLLAQIGDQYADLFLAAKNLSDAILLSDILRVNTEITKAPLSASMIKRYDEHHQDLTLLKALVRQQLPEKYKEIFFDQSKNGYAGYIDGGASQEEFYKFIKPILEKMDGTEELLVKLNREDLLRKQRTFDNGSIPHQIHLGELHAILRRQEDFYPFLKDNREKIEKILTFRIPYYVGPLARGNSRFAWMTRKSEETITPWNFEEVVDKGASAQSFIERMTNFDKNLPNEKVLPKHSLLYEYFTVYNELTKVKYVTEGMRKPAFLSGEQKKAIVDLLFKTNRKVTVKQLKEDYFKKIECFDSVEISGVEDRFNASLGTYHDLLKIIKDKDFLDNEENEDILEDIVLTLTLFEDREMIEERLKTYAHLFDDKVMKQLKRRRYTGWGRLSRKLINGIRDKQSGKTILDFLKSDGFANRNFMQLIHDDSLTFKEDIQKAQVSGQGDSLHEHIANLAGSPAIKKGILQTVKVVDELVKVMGRHKPENIVIEMARENQTTQKGQKNSRERMKRIEEGIKELGSQILKEHPVENTQLQNEKLYLYYLQNGRDMYVDQELDINRLSDYDVDHIVPQSFLKDDSIDNKVLTRSDKNRGKSDNVPSEEVVKKMKNYWRQLLNAKLITQRKFDNLTKAERGGLSELDKAGFIKRQLVETRQITKHVAQILDSRMNTKYDENDKLIREVKVITLKSKLVSDFRKDFQFYKVREINNYHHAHDAYLNAVVGTALIKKYPKLESEFVYGDYKVYDVRKMIAKSEQEIGKATAKYFFYSNIMNFFKTEITLANGEIRKRPLIETNGETGEIVWDKGRDFATVRKVLSMPQVNIVKKTEVQTGGFSKESILPKRNSDKLIARKKDWDPKKYGGFDSPTVAYSVLVVAKVEKGKSKKLKSVKELLGITIMERSSFEKNPIDFLEAKGYKEVKKDLIIKLPKYSLFELENGRKRMLASAGELQKGNELALPSKYVNFLYLASHYEKLKGSPEDNEQKQLFVEQHKHYLDEIIEQISEFSKRVILADANLDKVLSAYNKHRDKPIREQAENIIHLFTLTNLGAPAAFKYFDTTIDRKRYTSTKEVLDATLIHQSITGLYETRIDLSQLGGD

SEQ ID NO: 311 - protein, 1367 aa, Streptococcus pyogenes
DKKYSIGLAIGTNSVGWAVITDEYKVPSKKFKVLGNTDRHSIKKNLIGALLFDSGETAEATRLKRTARRRYTRRKNRICYLQEIFSNEMAKVDDSFFHRLEESFLVEEDKKHERHPIFGNIVDEVAYHEKYPTIYHLRKKLVDSTDKADLRLIYLALAHMIKFRGHFLIEGDLNPDNSDVDKLFIQLVQTYNQLFEENPINASGVDAKAILSARLSKSRRLENLIAQLPGEKKNGLFGNLIALSLGLTPNFKSNFDLAEDAKLQLSKDTYDDDLDNLLAQIGDQYADLFLAAKNLSDAILLSDILRVNTEITKAPLSASMIKRYDEHHQDLTLLKALVRQQLPEKYKEIFFDQSKNGYAGYIDGGASQEEFYKFIKPILEKMDGTEELLVKLNREDLLRKQRTFDNGSIPHQIHLGELHAILRRQEDFYPFLKDNREKIEKILTFRIPYYVGPLARGNSRFAWMTRKSEETITPWNFEEVVDKGASAQSFIERMTNFDKNLPNEKVLPKHSLLYEYFTVYNELTKVKYVTEGMRKPAFLSGEQKKAIVDLLFKTNRKVTVKQLKEDYFKKIECFDSVEISGVEDRFNASLGTYHDLLKIIKDKDFLDNEENEDILEDIVLTLTLFEDREMIEERLKTYAHLFDDKVMKQLKRRRYTGWGRLSRKLINGIRDKQSGKTILDFLKSDGFANRNFMQLIHDDSLTFKEDIQKAQVSGQGDSLHEHIANLAGSPAIKKGILQTVKVVDELVKVMGRHKPENIVIEMARENQTTQKGQKNSRERMKRIEEGIKELGSQILKEHPVENTQLQNEKLYLYYLQNGRDMYVDQELDINRLSDYDVDHIVPQSFLKDDSIDNKVLTRSDKNRGKSDNVPSEEVVKKMKNYWRQLLNAKLITQRKFDNLTKAERGGLSELDKAGFIKRQLVETRQITKHVAQILDSRMNTKYDENDKLIREVKVITLKSKLVSDFRKDFQFYKVREINNYHHAHDAYLNAVVGTALIKKYPKLESEFVYGDYKVYDVRKMIAKSEQEIGKATAKYFFYSNIMNFFKTEITLANGEIRKRPLIETNGETGEIVWDKGRDFATVRKVLSMPQVNIVKKTEVQTGGFSKESILPKRNSDKLIARKKDWDPKKYGGFESPTVAYSVLVVAKVEKGKSKKLKSVKELLGITIMERSSFEKNPIDFLEAKGYKEVKKDLIIKLPKYSLFELENGRKRMLASAGELQKGNELALPSKYVNFLYLASHYEKLKGSPEDNEQKQLFVEQHKHYLDEIIEQISEFSKRVILADANLDKVLSAYNKHRDKPIREQAENIIHLFTLTNLGAPAAFKYFDTTIDRKQYRSTKEVLDATLIHQSITGLYETRIDLSQLGGD

SEQ ID NO: 312 - protein, 1367 aa, Streptococcus pyogenes
DKKYSIGLAIGTNSVGWAVITDEYKVPSKKFKVLGNTDRHSIKKNLIGALLFDSGETAEATRLKRTARRRYTRRKNRICYLQEIFSNEMAKVDDSFFHRLEESFLVEEDKKHERHPIFGNIVDEVAYHEKYPTIYHLRKKLVDSTDKADLRLIYLALAHMIKFRGHFLIEGDLNPDNSDVDKLFIQLVQTYNQLFEENPINASGVDAKAILSARLSKSRRLENLIAQLPGEKKNGLFGNLIALSLGLTPNFKSNFDLAEDAKLQLSKDTYDDDLDNLLAQIGDQYADLFLAAKNLSDAILLSDILRVNTEITKAPLSASMIKRYDEHHQDLTLLKALVRQQLPEKYKEIFFDQSKNGYAGYIDGGASQEEFYKFIKPILEKMDGTEELLVKLNREDLLRKQRTFDNGSIPHQIHLGELHAILRRQEDFYPFLKDNREKIEKILTFRIPYYVGPLARGNSRFAWMTRKSEETITPWNFEEVVDKGASAQSFIERMTNFDKNLPNEKVLPKHSLLYEYFTVYNELTKVKYVTEGMRKPAFLSGEQKKAIVDLLFKTNRKVTVKQLKEDYFKKIECFDSVEISGVEDRFNASLGTYHDLLKIIKDKDFLDNEENEDILEDIVLTLTLFEDREMIEERLKTYAHLFDDKVMKQLKRRRYTGWGRLSRKLINGIRDKQSGKTILDFLKSDGFANRNFMQLIHDDSLTFKEDIQKAQVSGQGDSLHEHIANLAGSPAIKKGILQTVKVVDELVKVMGRHKPENIVIEMARENQTTQKGQKNSRERMKRIEEGIKELGSQILKEHPVENTQLQNEKLYLYYLQNGRDMYVDQELDINRLSDYDVDHIVPQSFLKDDSIDNKVLTRSDKNRGKSDNVPSEEVVKKMKNYWRQLLNAKLITQRKFDNLTKAERGGLSELDKAGFIKRQLVETRQITKHVAQILDSRMNTKYDENDKLIREVKVITLKSKLVSDFRKDFQFYKVREINNYHHAHDAYLNAVVGTALIKKYPKLESEFVYGDYKVYDVRKMIAKSEQEIGKATAKYFFYSNIMNFFKTEITLANGEIRKRPLIETNGETGEIVWDKGRDFATVRKVLSMPQVNIVKKTEVQTGGFSKESILPKRNSDKLIARKKDWDPKKYGGFVSPTVAYSVLVVAKVEKGKSKKLKSVKELLGITIMERSSFEKNPIDFLEAKGYKEVKKDLIIKLPKYSLFELENGRKRMLASAGELQKGNELALPSKYVNFLYLASHYEKLKGSPEDNEQKQLFVEQHKHYLDEIIEQISEFSKRVILADANLDKVLSAYNKHRDKPIREQAENIIHLFTLTNLGAPAAFKYFDTTIDRKQYRSTKEVLDATLIHQSITGLYETRIDLSQLGGD

SEQ ID NO: 313 - protein, 1367 aa, Streptococcus pyogenes
DKKYSIGLAIGTNSVGWAVITDEYKVPSKKFKVLGNTDRHSIKKNLIGALLFDSGETAEATRLKRTARRRYTRRKNRICYLQEIFSNEMAKVDDSFFHRLEESFLVEEDKKHERHPIFGNIVDEVAYHEKYPTIYHLRKKLVDSTDKADLRLIYLALAHMIKFRGHFLIEGDLNPDNSDVDKLFIQLVQTYNQLFEENPINASGVDAKAILSARLSKSRRLENLIAQLPGEKKNGLFGNLIALSLGLTPNFKSNFDLAEDAKLQLSKDTYDDDLDNLLAQIGDQYADLFLAAKNLSDAILLSDILRVNTEITKAPLSASMIKRYDEHHQDLTLLKALVRQQLPEKYKEIFFDQSKNGYAGYIDGGASQEEFYKFIKPILEKMDGTEELLVKLNREDLLRKQRTFDNGSIPHQIHLGELHAILRRQEDFYPFLKDNREKIEKILTFRIPYYVGPLARGNSRFAWMTRKSEETITPWNFEEVVDKGASAQSFIERMTNFDKNLPNEKVLPKHSLLYEYFTVYNELTKVKYVTEGMRKPAFLSGEQKKAIVDLLFKTNRKVTVKQLKEDYFKKIECFDSVEISGVEDRFNASLGTYHDLLKIIKDKDFLDNEENEDILEDIVLTLTLFEDREMIEERLKTYAHLFDDKVMKQLKRRRYTGWGRLSRKLINGIRDKQSGKTILDFLKSDGFANRNFMQLIHDDSLTFKEDIQKAQVSGQGDSLHEHIANLAGSPAIKKGILQTVKVVDELVKVMGRHKPENIVIEMARENQTTQKGQKNSRERMKRIEEGIKELGSQILKEHPVENTQLQNEKLYLYYLQNGRDMYVDQELDINRLSDYDVDHIVPQSFLKDDSIDNKVLTRSDKNRGKSDNVPSEEVVKKMKNYWRQLLNAKLITQRKFDNLTKAERGGLSELDKAGFIKRQLVETRQITKHVAQILDSRMNTKYDENDKLIREVKVITLKSKLVSDFRKDFQFYKVREINNYHHAHDAYLNAVVGTALIKKYPKLESEFVYGDYKVYDVRKMIAKSEQEIGKATAKYFFYSNIMNFFKTEITLANGEIRKRPLIETNGETGEIVWDKGRDFATVRKVLSMPQVNIVKKTEVQTGGFSKESILPKRNSDKLIARKKDWDPKKYGGFVSPTVAYSVLVVAKVEKGKSKKLKSVKELLGITIMERSSFEKNPIDFLEAKGYKEVKKDLIIKLPKYSLFELENGRKRMLASARELQKGNELALPSKYVNFLYLASHYEKLKGSPEDNEQKQLFVEQHKHYLDEIIEQISEFSKRVILADANLDKVLSAYNKHRDKPIREQAENIIHLFTLTNLGAPAAFKYFDTTIDRKEYRSTKEVLDATLIHQSITGLYETRIDLSQLGGD

SEQ ID NO: 314 - DNA, 20 bp, Artificial Sequence
  Synthetic Polynucleotide
ggggccactagggacaggat

SEQ ID NO: 315 - DNA, 20 bp, Artificial Sequence
  Synthetic Polynucleotide
gggtggggggagtttgctcc

SEQ ID NO: 316 - DNA, 20 bp, Artificial Sequence
  Synthetic Polynucleotide
gcagatgtagtgtttccaca

SEQ ID NO: 317 - DNA, 20 bp, Artificial Sequence
  Synthetic Polynucleotide
tcactatgctgccgcccagt

SEQ ID NO: 318-552 - skipped (235 entries)

SEQ ID NO: 553 - protein, 84 aa, Artificial Sequence
  Synthetic polypeptide
MTNLSDIIEKETGKQLVIQESILMLPEEVEEVIGNKPESDILVHTAYDESTDENVMLLTSDAPEYKPWALVIQDSNGENKIKML

SEQ ID NO: 554-673 - skipped (120 entries)

SEQ ID NO: 674 - DNA, 51 bp, Artificial Sequence
  Synthetic polynucleotide
atgttcactgttgacttctggactaytatggaaaatcacaaccacagcaag

SEQ ID NO: 675 - DNA, 51 bp, Artificial Sequence
  Synthetic polynucleotide
gctgggagctgccatgtgtgggcgcygcatgcgaggagaggctggaggggg

SEQ ID NO: 676 - DNA, 51 bp, Artificial Sequence
  Synthetic polynucleotide
cgtggcgctggccatcctcaagttcytccacaaggtgagggccgggcagcc

SEQ ID NO: 677 - DNA, 51 bp, Artificial Sequence
  Synthetic polynucleotide
catcttctgcttcattgtgcctctcbccctcatctgcttctcctacactca

SEQ ID NO: 678 - DNA, 51 bp, Artificial Sequence
  Synthetic polynucleotide
aaaaggattaaaatgttttttgcccygggtcctgtggcttccgtcgccttc

SEQ ID NO: 679 - DNA, 51 bp, Artificial Sequence
  Synthetic polynucleotide
ctgaagccgcgccctctgcagatcaytggggtggatcccgaagggtccatc

SEQ ID NO: 680 - DNA, 51 bp, Artificial Sequence
  Synthetic polynucleotide
ttcggggtggtcaccgccattgactygctgaacttcgtggccgcccaggag

SEQ ID NO: 681 - DNA, 51 bp, Artificial Sequence
  Synthetic polynucleotide
cgcccacttctcacccctggtcttcytcctcctcctatccatcatgatggc

SEQ ID NO: 682 - DNA, 51 bp, Artificial Sequence
  Synthetic polynucleotide
cttttcagcggctgcctcagttacgycaaggtgatgctgggcgtggtcctg

SEQ ID NO: 683 - DNA, 51 bp, Artificial Sequence
  Synthetic polynucleotide
ggaatataagtatggtgcacacaacyaccatcctttacctgtagccctgga

SEQ ID NO: 684 - DNA, 51 bp, Artificial Sequence
  Synthetic polynucleotide
tgtctacgacttcgagataatggacytctggccaagccaacccatggcgac

SEQ ID NO: 685 - DNA, 51 bp, Artificial Sequence
  Synthetic polynucleotide
tttagattgggatgcttggaaggtgygtctacgacttcgagataatggact

SEQ ID NO: 686 - DNA, 51 bp, Artificial Sequence
  Synthetic polynucleotide
tgttgaagatcggatgtccgtaataygggaaaaaggcgtggtgggtttcac

SEQ ID NO: 687 - DNA, 51 bp, Artificial Sequence
  Synthetic polynucleotide
tccagaattctttggggctgttataygtgccaatgtgactggaagttacgg

SEQ ID NO: 688 - DNA, 51 bp, Artificial Sequence
  Synthetic polynucleotide
gtgtgagagagagcagtgtgacggcyctgtaggctttggaggaagtcctga

SEQ ID NO: 689 - DNA, 51 bp, Artificial Sequence
  Synthetic polynucleotide
caagtttcccgctggagggaagatgyctcagtacctggagagcatgcagat

SEQ ID NO: 690 - DNA, 51 bp, Artificial Sequence
  Synthetic polynucleotide
gagttccggggccccagtgggctgcyggtctaccagggcaaaggtgattcg

SEQ ID NO: 691 - DNA, 51 bp, Artificial Sequence
  Synthetic polynucleotide
gaaggaccctgatgaccacactgtgygccacctgctctttgccaaccaggt

SEQ ID NO: 692 - DNA, 51 bp, Artificial Sequence
  Synthetic polynucleotide
ccgtcaccccagcacatcctgggccyccctgtcggtgagtcacgcccctgc

SEQ ID NO: 693 - DNA, 51 bp, Artificial Sequence
  Synthetic polynucleotide
cctggagacatccaggtggtgcccaytggagtgggccctaatgccaacgtg

SEQ ID NO: 694 - DNA, 51 bp, Artificial Sequence
  Synthetic polynucleotide
ctacatggtcaccggaaatcctgccyctgatgagatcaagaggctgcctgg

SEQ ID NO: 695 - DNA, 51 bp, Artificial Sequence
  Synthetic polynucleotide
ggaaccgccgttgcacgatttctacbgcagcaggctactggacctggtctt

SEQ ID NO: 696 - DNA, 51 bp, Artificial Sequence
  Synthetic polynucleotide
caacgatgtgcaggaccagtgctccygctgctctccgacacggacggagcc

SEQ ID NO: 697 - DNA, 51 bp, Artificial Sequence
  Synthetic polynucleotide
tgagtgtgagtggcgctataacagcygtgcacctgcctgtcaagtcacgtg

SEQ ID NO: 698 - DNA, 51 bp, Artificial Sequence
  Synthetic polynucleotide
gaagcagacgatggtggattcctccygtagaatccttaccagtgacgtctt

SEQ ID NO: 699 - DNA, 51 bp, Artificial Sequence
  Synthetic polynucleotide
tgtttggaatacatgactccatggcygtcaaatctagttcgtttttgcaag

SEQ ID NO: 700 - DNA, 51 bp, Artificial Sequence
  Synthetic polynucleotide
attcatgcagatccaaagctcttgcyttgtgtaagtatttttttatgaaat

SEQ ID NO: 701 - DNA, 51 bp, Artificial Sequence
  Synthetic polynucleotide
attttagcacgctacatgctgatgcygtccttcaacaattcccttgatgtg

SEQ ID NO: 702 - DNA, 51 bp, Artificial Sequence
  Synthetic polynucleotide
ctgttggggtttttatagaacctgcyttttaatccaagtaagccattctca

SEQ ID NO: 703 - DNA, 51 bp, Artificial Sequence
  Synthetic polynucleotide
tctcaggatgaactagctcgagttcyggttactctgtttgattctcggcat

SEQ ID NO: 704 - DNA, 51 bp, Artificial Sequence
  Synthetic polynucleotide
ctccggctccaagcacctccactacyggtctgccgccctgccttctgggcg

SEQ ID NO: 705 - DNA, 51 bp, Artificial Sequence
  Synthetic polynucleotide
atctcctacaggctttggtcttctcyccagacccactgctgctctcaaaac

SEQ ID NO: 706 - DNA, 51 bp, Artificial Sequence
  Synthetic polynucleotide
gatgtagacatggcctgcaatttcaygggggatgagtggtttgtggattcc

SEQ ID NO: 707 - DNA, 51 bp, Artificial Sequence
  Synthetic polynucleotide
gcgtacctatgggcttccttgccacygtcccttcaaagaagtaagtactta

SEQ ID NO: 708 - DNA, 51 bp, Artificial Sequence
  Synthetic polynucleotide
ccagagtttgcccaggagctgcaacygtacggacacatctacatgtaccgg

SEQ ID NO: 709 - DNA, 51 bp, Artificial Sequence
  Synthetic polynucleotide
atatggagtgatacccaaaatccagygccttccaccaagccaggttagaca

SEQ ID NO: 710 - DNA, 51 bp, Artificial Sequence
  Synthetic polynucleotide
gacttcgccgcgcgttggtcagccayggccaccgctctcgcgctacgtagc

SEQ ID NO: 711 - DNA, 51 bp, Artificial Sequence
  Synthetic polynucleotide
catgaacaccttcagcgtcatgcccycacccaaggtgtcagacacggtggt

SEQ ID NO: 712 - DNA, 51 bp, Artificial Sequence
  Synthetic polynucleotide
cccacctacggggacctcaaccaccyggtgtcggccaccatgagcggggtc

SEQ ID NO: 713 - DNA, 51 bp, Artificial Sequence
  Synthetic polynucleotide
catggtgcccttccctcgcctgcacytcttcatgcccggcttcgcgcccct

SEQ ID NO: 714 - DNA, 51 bp, Artificial Sequence
  Synthetic polynucleotide
tcgaacacaaactcatgcaactctgygttccacttcggccaagaaattaga

SEQ ID NO: 715 - DNA, 51 bp, Artificial Sequence
  Synthetic polynucleotide
catccgggaagatgatgggaagacaygtaccaggggagacaaatatcccaa

SEQ ID NO: 716 - DNA, 51 bp, Artificial Sequence
  Synthetic polynucleotide
gaaagatggtgttgactttgggaagyggcgtgctgtgctgaggattgccga

SEQ ID NO: 717 - DNA, 51 bp, Artificial Sequence
  Synthetic polynucleotide
aaccaaagctgttttctccttccagygggttgccagcgttgatgtggtgga

SEQ ID NO: 718 - DNA, 51 bp, Artificial Sequence
  Synthetic polynucleotide
gcagacacagctcacgctgcagtggygagactcgcccgcagggtacactga

SEQ ID NO: 719 - DNA, 51 bp, Artificial Sequence
  Synthetic polynucleotide
aaaatgtactaattttttaaggtttyctggaagcaagctaaagaatgaggt

SEQ ID NO: 720 - DNA, 51 bp, Artificial Sequence
  Synthetic polynucleotide
ctgcggggcctgtgacgtgcgggccrggcccccgagggccttatcggcccc

SEQ ID NO: 721 - DNA, 51 bp, Artificial Sequence
  Synthetic polynucleotide
tcacatcctcaccaccctggaccacyggagcagccgctgcgagtacttgag

SEQ ID NO: 722 - DNA, 51 bp, Artificial Sequence
  Synthetic polynucleotide
cctgtctgcagggagactaaatcctycttcaccagccagcagctgtgaccc

SEQ ID NO: 723 - DNA, 51 bp, Artificial Sequence
  Synthetic polynucleotide
tattgagtagaaaacatttctcaggytgctaagctggaataaaatccactt

SEQ ID NO: 724 - DNA, 51 bp, Artificial Sequence
  Synthetic polynucleotide
gctgtcaatgacctgggacatctgcytgggagagctggctttaatactctg

SEQ ID NO: 725 - DNA, 51 bp, Artificial Sequence
  Synthetic polynucleotide
ttacaggaaattggccttgcctctcygggtgcacctgatgaatacattgaa

SEQ ID NO: 726 - DNA, 51 bp, Artificial Sequence
  Synthetic polynucleotide
ggcctgctttcctctcgggatttctygggtggcctggccttccgagtcttc

SEQ ID NO: 727 - DNA, 51 bp, Artificial Sequence
  Synthetic polynucleotide
tcactcaaagaagaagttggtgcatyggccaaagtattgcgcttatttgag

SEQ ID NO: 728 - DNA, 51 bp, Artificial Sequence
  Synthetic polynucleotide
aaaggcatatggtgctgggctcctgbcatcctttggtgaattacaggtatg

SEQ ID NO: 729 - DNA, 51 bp, Artificial Sequence
  Synthetic polynucleotide
gctctgacaaacatcatcaagatctygaggcatgacattggtgccactgtc

SEQ ID NO: 730 - DNA, 51 bp, Artificial Sequence
  Synthetic polynucleotide
tgcactggtttccgcctccgacctghggctggcctgctttcctctcgggat

SEQ ID NO: 731 - DNA, 51 bp, Artificial Sequence
  Synthetic polynucleotide
  misc_feature (26)..(26): n is a, c, g, t or u
gagaatgatgtaaacctgacccacantgaatctagaccttctcgtttaaag

SEQ ID NO: 732 - DNA, 51 bp, Artificial Sequence
  Synthetic polynucleotide
catttggataatttctcaaaccaaaytggaaaacattataagaaagttatg

SEQ ID NO: 733 - DNA, 51 bp, Artificial Sequence
  Synthetic polynucleotide
aaggccggctacgtcagcaagattgycggcaagtggtaagtctcctggcca

SEQ ID NO: 734 - DNA, 51 bp, Artificial Sequence
  Synthetic polynucleotide
tcctttgactcagaagaagaagaacytggggagcttctccaacagtttgga

SEQ ID NO: 735 - DNA, 51 bp, Artificial Sequence
  Synthetic polynucleotide
aatgagcaagtcccaatggaagtcaytgataatgtcatcagaacggcaggt

SEQ ID NO: 736 - DNA, 51 bp, Artificial Sequence
  Synthetic polynucleotide
catttaggattctctgttgatgaccytggatgctgtaaagtgattcgtcat

SEQ ID NO: 737 - DNA, 51 bp, Artificial Sequence
  Synthetic polynucleotide
aaagatgaaaagctgctgtcgtttcyaaaagatgtgtatgttgattccaaa

SEQ ID NO: 738 - DNA, 51 bp, Artificial Sequence
  Synthetic polynucleotide
gcaggtgctggccctggagcggcgcytcaagcagcagcggtacctgtcagc

SEQ ID NO: 739 - DNA, 51 bp, Artificial Sequence
  Synthetic polynucleotide
tatctactttggaggcctgtctggcycctttctctacacaggaggtaagat

SEQ ID NO: 740 - DNA, 51 bp, Artificial Sequence
  Synthetic polynucleotide
ttgtctaaaaaggccatcggggagtycattttggtggacaaggatgtgaag

SEQ ID NO: 741 - DNA, 51 bp, Artificial Sequence
  Synthetic polynucleotide
tttacagcaccaaataatctggcccygtcagcccagctgtgttcctctgga

SEQ ID NO: 742 - DNA, 51 bp, Artificial Sequence
  Synthetic polynucleotide
tctttccagcctctgtttctctaccytgctctccagtctgtgcatgagccc

SEQ ID NO: 743 - DNA, 51 bp, Artificial Sequence
  Synthetic polynucleotide
aaggatggccagccatttcgctacayctcaggaagcattcactactcccgt

SEQ ID NO: 744 - DNA, 51 bp, Artificial Sequence
  Synthetic polynucleotide
aaggggctgtgtgtgtcttggcaggbatgtgccctggaactttcatgagcc

SEQ ID NO: 745 - DNA, 51 bp, Artificial Sequence
  Synthetic polynucleotide
cctccccttctattggaatttccacygcatgctagctagtccttccctggt

SEQ ID NO: 746 - DNA, 51 bp, Artificial Sequence
  Synthetic polynucleotide
cagaaattggcaccattccttaagabgtatggagaatatgtgaaaggattt

SEQ ID NO: 747 - DNA, 51 bp, Artificial Sequence
  Synthetic polynucleotide
ttgggccttccctaaccagggtcctycctccttatctacctgaatgagttt

SEQ ID NO: 748 - DNA, 51 bp, Artificial Sequence
  Synthetic polynucleotide
gagacgatccccagcgacagcggcaytgggacagacaacaacagcacttct

SEQ ID NO: 749 - DNA, 51 bp, Artificial Sequence
  Synthetic polynucleotide
ctcctaggcgctgtcctgggctggcygatgactccccgagtgcctatggag

SEQ ID NO: 750 - DNA, 51 bp, Artificial Sequence
  Synthetic polynucleotide
cttcagcattgtcatgaacgagctcyccggcagcgacaacgtgccctacgt

SEQ ID NO: 751 - DNA, 51 bp, Artificial Sequence
  Synthetic polynucleotide
gaccccgagctgtgcatccggctgcyccagatgccctctgtggtcaactac

SEQ ID NO: 752 - DNA, 51 bp, Artificial Sequence
  Synthetic polynucleotide
tttgaaattaagaacttcgtgaaggbaccaacctctgttattaataaaata

SEQ ID NO: 753 - DNA, 51 bp, Artificial Sequence
  Synthetic polynucleotide
ccttcatcccgaatataacttcactyctcaatatcttgttcatgttaatga

SEQ ID NO: 754 - DNA, 51 bp, Artificial Sequence
  Synthetic polynucleotide
cttcagccaggacttctgcatccggygcaagaggcagttttacttgtacaa

SEQ ID NO: 755 - DNA, 51 bp, Artificial Sequence
  Synthetic polynucleotide
gctgcccgctgggtggccaagtctcyggtgaaagcagggctctgccggaga

SEQ ID NO: 756 - DNA, 51 bp, Artificial Sequence
  Synthetic polynucleotide
aacattttgtctttcttctagttgcbagaacctgtctgtcaccagctcttt

SEQ ID NO: 757 - DNA, 51 bp, Artificial Sequence
  Synthetic polynucleotide
gggtgattctttcaatacttccttaytcaaacaaacttttcaaagagtctt

SEQ ID NO: 758 - DNA, 51 bp, Artificial Sequence
  Synthetic polynucleotide
ccatcaagtgtcctacgtaaaggagyattggaatgatgtgttcaggtgagt

SEQ ID NO: 759 - DNA, 51 bp, Artificial Sequence
  Synthetic polynucleotide
ctgcaggtgcttcagctgctgctgcygtgtgccttcggcatgagctccctg

SEQ ID NO: 760 - DNA, 51 bp, Artificial Sequence
  Synthetic polynucleotide
agtgacaggggtgcggtaccagcagycgtggctctgcatcatgtgagttgc

SEQ ID NO: 761 - DNA, 51 bp, Artificial Sequence
  Synthetic polynucleotide
gccctgatggtggtggccgtgctccygggcttcgtggccatggtcctcagc

SEQ ID NO: 762 - DNA, 51 bp, Artificial Sequence
  Synthetic polynucleotide
aacacagatggtcagacttttgagaytgcaatttctaaccagatgagacaa

SEQ ID NO: 763 - DNA, 51 bp, Artificial Sequence
  Synthetic polynucleotide
acaggtctttactggcttattttctycaaagtgagtgagtttctgaatttt

SEQ ID NO: 764 - DNA, 51 bp, Artificial Sequence
  Synthetic polynucleotide
agaacgttttgtcacttatgttggahgtgcctttgctctgaaggtaagttt

SEQ ID NO: 765 - DNA, 51 bp, Artificial Sequence
  Synthetic polynucleotide
acatcttgtcaagctcttggaaataygtgtgtgatgaacatgaattcttac

SEQ ID NO: 766 - DNA, 51 bp, Artificial Sequence
  Synthetic polynucleotide
ccccgtgcgcaacttgcgcctccggyagtcgcaccgccccagccccgaggc

SEQ ID NO: 767 - DNA, 51 bp, Artificial Sequence
  Synthetic polynucleotide
aattacatgctcatttactttaagcytgttggactaccagcaatgccagca

SEQ ID NO: 768 - DNA, 51 bp, Artificial Sequence
  Synthetic polynucleotide
atggaatggtctataactggaatgcyggagttcagtttgtttggaatacct

SEQ ID NO: 769 - DNA, 51 bp, Artificial Sequence
  Synthetic polynucleotide
caccccaaccgacgccccaagatccyggcccagacagcagcccatgtagct

SEQ ID NO: 770 - DNA, 51 bp, Artificial Sequence
  Synthetic polynucleotide
gcacgatcccgagactctgcttcgcygcatcgctgaaagggccttcctgag

SEQ ID NO: 771 - DNA, 51 bp, Artificial Sequence
  Synthetic polynucleotide
gagaaaagcctgtttaccaaggagcytgaacatgccctggagaagaatgag

SEQ ID NO: 772 - DNA, 51 bp, Artificial Sequence
  Synthetic polynucleotide
accagagggtcccctggtcgaagcaytggaatccagaaaccagttgggcat

SEQ ID NO: 773 - DNA, 51 bp, Artificial Sequence
  Synthetic polynucleotide
agactccaatgtcattgtggtggacyggctgtcacgggctcaggagcatta

SEQ ID NO: 774 - DNA, 51 bp, Artificial Sequence
  Synthetic polynucleotide
aacattggagaagctatccgcgtgaytgcagagagaggacttggaggtaaa

SEQ ID NO: 775 - DNA, 51 bp, Artificial Sequence
  Synthetic polynucleotide
gctggggccaggccccgcggccgacytctccgtgtcggtggagcgcgctct

SEQ ID NO: 776 - DNA, 51 bp, Artificial Sequence
  Synthetic polynucleotide
gcgtgtgctccgagatcttcgcatcytccggatctttgaggggacaaatga

SEQ ID NO: 777 - DNA, 51 bp, Artificial Sequence
  Synthetic polynucleotide
gaaagagaatgctgtgcccacaatayttctttgtactgagccacatgacaa

SEQ ID NO: 778 - DNA, 51 bp, Artificial Sequence
  Synthetic polynucleotide
agacaagagtcgtccttttattacgyccagtcctacaaatggggctgaaac

SEQ ID NO: 779 - DNA, 51 bp, Artificial Sequence
  Synthetic polynucleotide
aagcagtttttgacaaatagagtgcyaaaagacccaaaacaaaggcggttt

SEQ ID NO: 780 - DNA, 51 bp, Artificial Sequence
  Synthetic polynucleotide
gaaacgaaatatcgtgtcttgaagaytgatagaacagaaccaaaagatttg

SEQ ID NO: 781 - DNA, 51 bp, Artificial Sequence
  Synthetic polynucleotide
gatggggacactgcctattttgcggygagtctctcctccctgccagctctc

SEQ ID NO: 782 - DNA, 51 bp, Artificial Sequence
  Synthetic polynucleotide
tctaaaggcaactctagacatcgcgyccaacaaccgtaagggtatcgcctt

SEQ ID NO: 783 - DNA, 51 bp, Artificial Sequence
  Synthetic polynucleotide
ggcgctgcatcacaatgagaaggagyggcaccagccggatcagttcatgcc

SEQ ID NO: 784 - DNA, 51 bp, Artificial Sequence
  Synthetic polynucleotide
gagatcctggcccgccaggagctctycctcatcatggcctggctgctgcag

SEQ ID NO: 785 - DNA, 51 bp, Artificial Sequence
  Synthetic polynucleotide
ggagatggtaacctgcacctcaatgygacggcggaggccttcagcccctcg

SEQ ID NO: 786 - DNA, 51 bp, Artificial Sequence
  Synthetic polynucleotide
tcctaccatgtatacctttaggcccyggaccatccgccagtatgctggttt

SEQ ID NO: 787 - DNA, 51 bp, Artificial Sequence
  Synthetic polynucleotide
ctgtaccagaagttcatggcctatcyttctcagggagggaaggtgttgggc

SEQ ID NO: 788 - DNA, 51 bp, Artificial Sequence
  Synthetic polynucleotide
aattgccatgcaaaacaggctccccygcatctacttaggcaagtcaccaga

SEQ ID NO: 789 - DNA, 51 bp, Artificial Sequence
  Synthetic polynucleotide
cattatgaccccatgattgcgaagcyggtcgtgtgggcagcagatcgccag

SEQ ID NO: 790 - DNA, 51 bp, Artificial Sequence
  Synthetic polynucleotide
attgcaaagattgctgactacggcaytgctcagtactgctgtagaatgggg

SEQ ID NO: 791 - DNA, 51 bp, Artificial Sequence
  Synthetic polynucleotide
gaggtgcggtacagtccgcacctgcyggccaactccaaagtggagccaatc

SEQ ID NO: 792 - DNA, 51 bp, Artificial Sequence
  Synthetic polynucleotide
ctggccgcctcattcagctccctgcygacctacggcctctccctcatccgg

SEQ ID NO: 793 - DNA, 51 bp, Artificial Sequence
  Synthetic polynucleotide
ccctgcacgggtggttaatgtgtccycggtggctcaccacattggcaagat

SEQ ID NO: 794 - DNA, 51 bp, Artificial Sequence
  Synthetic polynucleotide
tgcctgctgctcaacctctgtgagayggcccacctgggcttgggcagcgcg

SEQ ID NO: 795 - DNA, 51 bp, Artificial Sequence
  Synthetic polynucleotide
cttcggctgcctgaacaacgcccggyacggcatcgcgtggggcgtgcttgg

SEQ ID NO: 796 - DNA, 51 bp, Artificial Sequence
  Synthetic polynucleotide
cggtttattgggccaagcccagaagbggtccgcaagatgggagacaaggtg

SEQ ID NO: 797 - DNA, 51 bp, Artificial Sequence
  Synthetic polynucleotide
gatcctgccatgaagcagtttctgcygtacttggatgagtccaatgccctg

SEQ ID NO: 798 - DNA, 51 bp, Artificial Sequence
  Synthetic polynucleotide
tcttcttccagacacagagattgacyggaaggcctacatggccgaggtaga

SEQ ID NO: 799 - DNA, 51 bp, Artificial Sequence
  Synthetic polynucleotide
ggctatgatgtagtaaaggaatgccytgttcatcaaagcgaaatttttgca

SEQ ID NO: 800 - DNA, 51 bp, Artificial Sequence
  Synthetic polynucleotide
ctgggccttggacccggactcgttaygaagagcgattcttcgacctctgca

SEQ ID NO: 801 - DNA, 51 bp, Artificial Sequence
  Synthetic polynucleotide
cttctggaggaggcggccgacctccyggtggtgcacctggacttccgggcg

SEQ ID NO: 802 - DNA, 51 bp, Artificial Sequence
  Synthetic polynucleotide
tggtcagatgatcatgtgcccactcbgtgatcaagtgtgtgattattggag

SEQ ID NO: 803 - DNA, 51 bp, Artificial Sequence
  Synthetic polynucleotide
ccagctggtgcaaggtttccgggtghcttggagggtagcaggccctgaggg

SEQ ID NO: 804 - DNA, 51 bp, Artificial Sequence
  Synthetic polynucleotide
ctgggtcgagccatgctgcgctaccygctgaaaacgctgctgcagatgaac

SEQ ID NO: 805 - DNA, 51 bp, Artificial Sequence
  Synthetic polynucleotide
gtatgtttttctcttcctaaggtaabtttaactagttcaaagcaaattgac

SEQ ID NO: 806 - DNA, 51 bp, Artificial Sequence
  Synthetic polynucleotide
gtctccagaggctgtggtccgcgaayggctggacaacattccagaagagcc

SEQ ID NO: 807 - DNA, 51 bp, Artificial Sequence
  Synthetic polynucleotide
gctcgagaccagctcatctatctgcyggagcaggtcagtgcttgcctgacg

SEQ ID NO: 808 - DNA, 51 bp, Artificial Sequence
  Synthetic polynucleotide
cgggattaccgcgcgctctgcgacgygggcaccgccatcagctgttcgcgc

SEQ ID NO: 809 - DNA, 51 bp, Artificial Sequence
  Synthetic polynucleotide
tggcacgggccgccgcatccacagchaccgaggtacgggcccggcgcttag

SEQ ID NO: 810 - DNA, 51 bp, Artificial Sequence
  Synthetic polynucleotide
caacttcgacggcgagccgcagcccyacccaacgctgccgcctggcacggg

SEQ ID NO: 811 - DNA, 51 bp, Artificial Sequence
  Synthetic polynucleotide
gaggccgggcggccgcggcccgtgcygcgctcggtgaactcgcgcgagccc

SEQ ID NO: 812 - DNA, 51 bp, Artificial Sequence
  Synthetic polynucleotide
gtgtatactctgaaagagcgatgccyccaggttgtccggagcctagtcaag

SEQ ID NO: 813 - DNA, 51 bp, Artificial Sequence
  Synthetic polynucleotide
cccgttaccacagaagaacaggttcbggacgtcaaaggttacctatccaaa

SEQ ID NO: 814 - DNA, 51 bp, Artificial Sequence
  Synthetic polynucleotide
aacatgtatgaagaaatggaaacatyagccagtgtacttcagtcagatatt

SEQ ID NO: 815 - DNA, 51 bp, Artificial Sequence
  Synthetic polynucleotide
tggccggtgcacctcttggagacgcygctgccgcggcacctccagatcatc

SEQ ID NO: 816 - DNA, 51 bp, Artificial Sequence
  Synthetic polynucleotide
ctttgacctgcagaacccaagagaghggacgcggatggtgatccggaacat

SEQ ID NO: 817 - DNA, 51 bp, Artificial Sequence
  Synthetic polynucleotide
catgtggagatccaagctgcctacaytggcacaactataatcattcggcag

SEQ ID NO: 818 - DNA, 51 bp, Artificial Sequence
  Synthetic polynucleotide
tggaggggtgggctctggcggcctcbgtcgagccctccgctcctatgcgct

SEQ ID NO: 819 - DNA, 51 bp, Artificial Sequence
  Synthetic polynucleotide
accgcccgcacctgccgcggggaccycgccttccattcggcggtacatggc

SEQ ID NO: 820 - DNA, 51 bp, Artificial Sequence
  Synthetic polynucleotide
gccaagtccagaaccatagggattaytggagctcctttctcaaagggacag

SEQ ID NO: 821 - DNA, 51 bp, Artificial Sequence
  Synthetic polynucleotide
gccgccatgatgctgctgcagctgcyggaaggcgtggaccatctggttcaa

SEQ ID NO: 822 - DNA, 51 bp, Artificial Sequence
  Synthetic polynucleotide
gccaggtacaacgccgccgccattcygaccatggagcccgtcctggggggc

SEQ ID NO: 823 - DNA, 51 bp, Artificial Sequence
  Synthetic polynucleotide
ccgggtcaccaaccccatcaatcccbggtaggtcctgccactcccagctct

SEQ ID NO: 824 - DNA, 51 bp, Artificial Sequence
  Synthetic polynucleotide
agtatttctgattgtcaggccaacayaatgcagatggaagaagcaaaggtt

SEQ ID NO: 825 - DNA, 51 bp, Artificial Sequence
  Synthetic polynucleotide
gtcagcccttcagacagagactttayggaaacgttaaacaccctgaaatac

SEQ ID NO: 826 - DNA, 51 bp, Artificial Sequence
  Synthetic polynucleotide
tcatggcggaaagagacagtccagcyatggccaggccccagtggctattca

SEQ ID NO: 827 - DNA, 51 bp, Artificial Sequence
  Synthetic polynucleotide
cctcagcgatgatcatggtgcctccyggcgctacggaagtggggtcagcgg

SEQ ID NO: 828 - DNA, 51 bp, Artificial Sequence
  Synthetic polynucleotide
tgatgcctacttcagtcccattcacycccagttggatcatttactggatcc

SEQ ID NO: 829 - DNA, 51 bp, Artificial Sequence
  Synthetic polynucleotide
tccaaggtagagcagcttgacaagayggtgacagaaaaggcaggatttaag

SEQ ID NO: 830 - DNA, 51 bp, Artificial Sequence
  Synthetic polynucleotide
cctgccttcaatagattgtttccccyggcttctctcgtgcttatctactgg

SEQ ID NO: 831 - DNA, 51 bp, Artificial Sequence
  Synthetic polynucleotide
ccttcctgtatcaggagtcccaggtrtattgtttccaggtgtttatcatct

SEQ ID NO: 832 - DNA, 51 bp, Artificial Sequence
  Synthetic polynucleotide
gtgggcatcttcgtggactacagaghtggaagcatctccttttacaatgtg

SEQ ID NO: 833 - DNA, 51 bp, Artificial Sequence
  Synthetic polynucleotide
ggtgaaggaatctctctccagttacygggagtcagcaaagacagccgccca

SEQ ID NO: 834 - DNA, 51 bp, Artificial Sequence
  Synthetic polynucleotide
ctcttctttctaaagcttgaaagaaytgctgattccaaggagcaagttttc

SEQ ID NO: 835 - DNA, 51 bp, Artificial Sequence
  Synthetic polynucleotide
tcagacttctctggctccactacccygctacgtttatctgattgagcatcc

SEQ ID NO: 836 - DNA, 51 bp, Artificial Sequence
  Synthetic polynucleotide
tgacttatggacgaagaaatacagtrcctgatggacataatattcaagatc

SEQ ID NO: 837 - DNA, 51 bp, Artificial Sequence
  Synthetic polynucleotide
ctgctgggctctgtcaacagcttgcygaaggagctgagatgaggccccaca

SEQ ID NO: 838 - DNA, 51 bp, Artificial Sequence
  Synthetic polynucleotide
tctctcaggtgacagtggggccgggygttggtctgtctctggaagacacca

SEQ ID NO: 839 - DNA, 51 bp, Artificial Sequence
  Synthetic polynucleotide
agtgaagaaaggtggatcctacatgygccatagggtaagtcatgtcactaa

SEQ ID NO: 840 - DNA, 51 bp, Artificial Sequence
  Synthetic polynucleotide
cttataggctgagaagtttggcgacycctttgtctttgaaggcatgttgag

SEQ ID NO: 841 - DNA, 51 bp, Artificial Sequence
  Synthetic polynucleotide
tgcagatgaagaaaatcatctgaathctaaaattgcctacaagatcgtctc

SEQ ID NO: 842 - DNA, 51 bp, Artificial Sequence
  Synthetic polynucleotide
cccccgcccctcctgcccaggcttcyacgtgacgctggtcgtgacccgctg

SEQ ID NO: 843 - DNA, 51 bp, Artificial Sequence
  Synthetic polynucleotide
tatggcgagttcttaatcttcctgcyctgctactacatcatccgctttatt

SEQ ID NO: 844 - DNA, 51 bp, Artificial Sequence
  Synthetic polynucleotide
cttggaggtcgaatccgggaccctaycctgctccagagcctgctgaacgtg

SEQ ID NO: 845 - DNA, 51 bp, Artificial Sequence
  Synthetic polynucleotide
tacgactggattagtatcccactggygtatacacaggtgaggactaggctg

SEQ ID NO: 846 - DNA, 51 bp, Artificial Sequence
  Synthetic polynucleotide
tgtttgttgttgttaaaaggatgttyttcgaaatttgagccacttgcctac

SEQ ID NO: 847 - DNA, 51 bp, Artificial Sequence
  Synthetic polynucleotide
tataaacattttacatgcaatgtacyaccaagaatcaaaggccttggtaag

SEQ ID NO: 848 - DNA, 51 bp, Artificial Sequence
  Synthetic polynucleotide
caggtgccatcttcaaacagttccaytatttatgtctggtgcacagttttg

SEQ ID NO: 849 - DNA, 51 bp, Artificial Sequence
  Synthetic polynucleotide
ctcaatgttacaccactggcaagaayagtaggtaaggccaggcgaggtggc

SEQ ID NO: 850 - DNA, 51 bp, Artificial Sequence
  Synthetic polynucleotide
ctcagttttcccattagcaagctccyggacttttttctgggccaggagatt

SEQ ID NO: 851 - DNA, 51 bp, Artificial Sequence
  Synthetic polynucleotide
gatgacaagaacaatgatggatacaytgactatgctgaatttgcaaaatca

SEQ ID NO: 852 - DNA, 51 bp, Artificial Sequence
  Synthetic polynucleotide
tgtgcccgaggaggacgggacccgcytccacagacaggtaagcacggccgt

SEQ ID NO: 853 - DNA, 51 bp, Artificial Sequence
  Synthetic polynucleotide
gacttccgggacaagctgagccccaytgtgctcagcctcaatgtgtcccta

SEQ ID NO: 854 - DNA, 51 bp, Artificial Sequence
  Synthetic polynucleotide
cccttccaggccggagagctggtgcytggggctcctggcggctattatttc

SEQ ID NO: 855 - DNA, 51 bp, Artificial Sequence
  Synthetic polynucleotide
tccaaaagaggatttggaattgcagygtccggaggcagagacaacccccac

SEQ ID NO: 856 - DNA, 51 bp, Artificial Sequence
  Synthetic polynucleotide
gcctaccatggcaacctcgagtcgcygcgtctcattgtgagccgcgggtga

SEQ ID NO: 857 - DNA, 51 bp, Artificial Sequence
  Synthetic polynucleotide
gacgctctgaagaaagcccgacttayagccagtaatgtcaccgaaaccatg

SEQ ID NO: 858 - DNA, 51 bp, Artificial Sequence
  Synthetic polynucleotide
tttgtccgggtcacaaccaatccagytgacctctggtcagcccccagcagc

SEQ ID NO: 859 - DNA, 51 bp, Artificial Sequence
  Synthetic polynucleotide
actgaacctgttttgtgagctgacaygtagccctcgacagagtcagttttt

SEQ ID NO: 860 - DNA, 51 bp, Artificial Sequence
  Synthetic polynucleotide
cgggccctgaccaccgtcacagcacytgtgaggaagttcctggggccagtg

SEQ ID NO: 861 - DNA, 51 bp, Artificial Sequence
  Synthetic polynucleotide
ctcaattctcggctggcctcttactyggataaggtgcaggctctagaggag

SEQ ID NO: 862 - DNA, 51 bp, Artificial Sequence
  Synthetic polynucleotide
  misc_feature (26)..(26): n is a, c, g, t or u
ctgactgctaatgagaagagcaccangcaggaactcaattctcggctggcc

SEQ ID NO: 863 - DNA, 51 bp, Artificial Sequence
  Synthetic polynucleotide
ccagcagaccagccaattactaaacytaagaatttagaagatgttgttgtc

SEQ ID NO: 864 - DNA, 51 bp, Artificial Sequence
  Synthetic polynucleotide
ggggtggggcctgagggggccttccygcccccccatcagggcttccatcga

SEQ ID NO: 865 - DNA, 51 bp, Artificial Sequence
  Synthetic polynucleotide
aatgatgttagagatcatcaactccygcctgacaaattcccttcaccacaa

SEQ ID NO: 866 - DNA, 51 bp, Artificial Sequence
  Synthetic polynucleotide
gaccaaactgaaatctgtaagcaggygggtaacagctgcagcatagctaac

SEQ ID NO: 867 - DNA, 51 bp, Artificial Sequence
  Synthetic polynucleotide
actcatgcgatccacttggtagtctytcatgagaggagtggcaactacctc

SEQ ID NO: 868 - DNA, 51 bp, Artificial Sequence
  Synthetic polynucleotide
ggcaggactaaggtggctggactcaygggacttttgaggccactgcaaaga

SEQ ID NO: 869 - DNA, 51 bp, Artificial Sequence
  Synthetic polynucleotide
acattggattccattttatttctacytaataacgtgcacctttctcatcct

SEQ ID NO: 870 - DNA, 51 bp, Artificial Sequence
  Synthetic polynucleotide
acgagggatgagttggagaggaggcygctgcagatgaaagaagaagcaaca

SEQ ID NO: 871 - DNA, 51 bp, Artificial Sequence
  Synthetic polynucleotide
gaatacatggaaaagagcaagcatcygcaggagcagctcaatgaactcaag

SEQ ID NO: 872 - DNA, 51 bp, Artificial Sequence
  Synthetic polynucleotide
ctggggctccgagaaacctggttctytggactgcagtacacaatcaaggac

SEQ ID NO: 873 - DNA, 51 bp, Artificial Sequence
  Synthetic polynucleotide
agacatgaacgtagttgttgttgatyggaatcgaggagctacaactttaat

SEQ ID NO: 874 - DNA, 51 bp, Artificial Sequence
  Synthetic polynucleotide
gccacgctgggggtcgccgagttctytgagtttgtgcttaagaacccccac

SEQ ID NO: 875 - DNA, 51 bp, Artificial Sequence
  Synthetic polynucleotide
accctcccgcactgtcttgcagtccygctggccctcgcggcctggctgcgg

SEQ ID NO: 876 - DNA, 51 bp, Artificial Sequence
  Synthetic polynucleotide
gtcccacctgatttccaggtatggtyttctaatcgaagggccaaatggaga

SEQ ID NO: 877 - DNA, 51 bp, Artificial Sequence
  Synthetic polynucleotide
ctctgtccatttaggtgtgaaaccaytccagtgtaaaacttgtcagcgaaa

SEQ ID NO: 878 - DNA, 51 bp, Artificial Sequence
  Synthetic polynucleotide
ccagtgtaaaacttgtcagcgaaagytctcccggtccgaccacctgaagac

SEQ ID NO: 879 - DNA, 51 bp, Artificial Sequence
  Synthetic polynucleotide
gtgccaggcctccacttctacacccycaaccgcgagatggctaccacagag

SEQ ID NO: 880 - DNA, 51 bp, Artificial Sequence
  Synthetic polynucleotide
tcacgcccaggaagtcgatcccaaaragtcctgaaggcttcccagacagct

SEQ ID NO: 881 - DNA, 51 bp, Artificial Sequence
  Synthetic polynucleotide
cccgtggacgatgcaatcaatgggcyaagcgaggagcagaggcaggtgagg

SEQ ID NO: 882 - DNA, 51 bp, Artificial Sequence
  Synthetic polynucleotide
cagttagctactgatgctgtgcagayacttggaggcaatggatttaataca

SEQ ID NO: 883 - DNA, 51 bp, Artificial Sequence
  Synthetic polynucleotide
ttaggaattaaacatgggccagcgaygttcagatactagaggaattgtctt

SEQ ID NO: 884 - DNA, 51 bp, Artificial Sequence
  Synthetic polynucleotide
ggaaatcatcccagtggctgcagaayatgataaaactggtgaagtaggtat

SEQ ID NO: 885 - DNA, 51 bp, Artificial Sequence
  Synthetic polynucleotide
ccccgccatgaccctctcaaccctcbgtgtcctggggccatccgagccaac

SEQ ID NO: 886 - DNA, 51 bp, Artificial Sequence
  Synthetic polynucleotide
ctccgtatccctatctgatagatctytgaaaacaaaggtgccatgatgggc

SEQ ID NO: 887 - DNA, 51 bp, Artificial Sequence
  Synthetic polynucleotide
cccttgacaggtatgggccagcagtytcctgccagatattgcccagcgtga

SEQ ID NO: 888 - DNA, 51 bp, Artificial Sequence
  Synthetic polynucleotide
actccggaccaggagcgctcactcaygttcatgcaatggggccagctgttg

SEQ ID NO: 889 - DNA, 51 bp, Artificial Sequence
  Synthetic polynucleotide
ctcagccaggagattcggaacgaggyttgtctgtgccagcagacaggtggg

SEQ ID NO: 890 - DNA, 51 bp, Artificial Sequence
  Synthetic polynucleotide
gactgtgcgcgccgccccctatgacyggcggctggagcccggtgagtgtct

SEQ ID NO: 891 - DNA, 51 bp, Artificial Sequence
  Synthetic polynucleotide
cgctttattgatggcttcatctctcytggggctccctggggtggctccatc

SEQ ID NO: 892 - DNA, 51 bp, Artificial Sequence
  Synthetic polynucleotide
caggtgccccagaccccagctgcccygaccccttccacccgctgcaggcca

SEQ ID NO: 893 - DNA, 51 bp, Artificial Sequence
  Synthetic polynucleotide
ccacagacttggaacgcagtgctgcygcgctatttcaaccccacaggtgcc

SEQ ID NO: 894 - DNA, 51 bp, Artificial Sequence
  Synthetic polynucleotide
acaaatctgacgaggaaaactgcggyatgggcggggccagggtgggggcgg

SEQ ID NO: 895 - DNA, 51 bp, Artificial Sequence
  Synthetic polynucleotide
cagagcagtggaagcagcagagttaygtttggagcaaaacaataaaactga

SEQ ID NO: 896 - DNA, 51 bp, Artificial Sequence
  Synthetic polynucleotide
gctaacatgctctttcttggccttaycagtgacaggggtcttcagaaagaa

SEQ ID NO: 897 - DNA, 51 bp, Artificial Sequence
  Synthetic polynucleotide
gccttccgtcttttataataggaccygccagtgctctggcaacttcatggg

SEQ ID NO: 898 - DNA, 51 bp, Artificial Sequence
  Synthetic polynucleotide
caccgcccgggccgagggcgactcabgggttctgaatggaaccaaagcctg

SEQ ID NO: 899 - DNA, 51 bp, Artificial Sequence
  Synthetic polynucleotide
gcgcctcagccactcacggtttccartcagcacagagaaggtctgggggac

SEQ ID NO: 900 - DNA, 51 bp, Artificial Sequence
  Synthetic polynucleotide
gccttcactgtccttgtctttcagcycctcggtgggtggtacttctacgtt

SEQ ID NO: 901 - DNA, 51 bp, Artificial Sequence
  Synthetic polynucleotide
agcaggggctgttgccgaaaggctgyggagcaacaagttgacatctgacct

SEQ ID NO: 902 - DNA, 51 bp, Artificial Sequence
  Synthetic polynucleotide
tggcatctggtagatgatccttcctycccatatgagagcttcacttttcca

SEQ ID NO: 903 - DNA, 51 bp, Artificial Sequence
  Synthetic polynucleotide
cttgctgttggatacatctcgccatyacctgccactctctagcatcctgga

SEQ ID NO: 904 - DNA, 51 bp, Artificial Sequence
  Synthetic polynucleotide
ctgggccaggtatgcgccccgcaccrgcttggccccaaaacaccagccctc

SEQ ID NO: 905 - DNA, 51 bp, Artificial Sequence
  Synthetic polynucleotide
gtgttcctgctaaacagcaatgccaygggtaagctgcccgccgcccagcgc

SEQ ID NO: 906 - DNA, 51 bp, Artificial Sequence
  Synthetic polynucleotide
gcggccggcgccctggagcgggccayggacgagctgctgcgccgcgcggtg

SEQ ID NO: 907 - DNA, 51 bp, Artificial Sequence
  Synthetic polynucleotide
aagaactgtgataaatttgggattgytgttcatgaattgggtcatgtgata

SEQ ID NO: 908 - DNA, 51 bp, Artificial Sequence
  Synthetic polynucleotide
cctgcagcggcccggacccgagaggygagaagagggaagcggaccagggaa

SEQ ID NO: 909 - DNA, 51 bp, Artificial Sequence
  Synthetic polynucleotide
ccctgcagatgtacctcgaggacctygctgggaaacaatggtgggacaggt

SEQ ID NO: 910 - DNA, 51 bp, Artificial Sequence
  Synthetic polynucleotide
gttgtcctacaaggagaggagcccaytgaaatacgctcaggtgtttccatt

SEQ ID NO: 911 - DNA, 51 bp, Artificial Sequence
  Synthetic polynucleotide
tgcagatgaccctgatgatctgcaaygtaagcggggagaacatgttgcgct

SEQ ID NO: 912 - DNA, 51 bp, Artificial Sequence
  Synthetic polynucleotide
atccctacggttgttgaatctagtcyatgatgtgactcccccagagcttgt

SEQ ID NO: 913 - DNA, 51 bp, Artificial Sequence
  Synthetic polynucleotide
accgccgagtacaaggcatggctgcytgggctgctgcgccagcacggctgc

SEQ ID NO: 914 - DNA, 51 bp, Artificial Sequence
  Synthetic polynucleotide
ctgcgtctccaagatcctgtgcaggyaccaggagactggctccatacgtcc

SEQ ID NO: 915 - DNA, 51 bp, Artificial Sequence
  Synthetic polynucleotide
gagaccacgcgctgcttcggaaccgyggtgggcgacacgcccgcctacctc

SEQ ID NO: 916 - DNA, 51 bp, Artificial Sequence
  Synthetic polynucleotide
ttcgcagtacaagctgcgcaagtccycccacctcaagaagctcaaccggta

SEQ ID NO: 917 - DNA, 51 bp, Artificial Sequence
  Synthetic polynucleotide
tgtactaggccatgaactggggcacyggaagttgggacatacagtcaaaaa

SEQ ID NO: 918 - DNA, 51 bp, Artificial Sequence
  Synthetic polynucleotide
gccccatgaggagtaccaggaggctyacgatgagtgcctggaggaggtgca

SEQ ID NO: 919 - DNA, 51 bp, Artificial Sequence
  Synthetic polynucleotide
gggatgcatcagtgccactgcgtccvggtcgttcttctgactggcaaccag

SEQ ID NO: 920 - DNA, 51 bp, Artificial Sequence
  Synthetic polynucleotide
catctaccaccagacctgggccagayactttgtgaagtaagggatcagcaa

SEQ ID NO: 921 - DNA, 51 bp, Artificial Sequence
  Synthetic polynucleotide
aaattcgaaaaggggtatttgatttytgttgtacgtttcctctttggcctg

SEQ ID NO: 922 - DNA, 51 bp, Artificial Sequence
  Synthetic polynucleotide
ggcttcgatgagctgcaaggtgcctytgacgagcacataggaccgctctgc

SEQ ID NO: 923 - DNA, 51 bp, Artificial Sequence
  Synthetic polynucleotide
ctcatcaccacgagacctgtggcccyggagaaactgcagcacttgctggac

SEQ ID NO: 924 - DNA, 51 bp, Artificial Sequence
  Synthetic polynucleotide
gagaagaccttccggatcggcttcaytgtgctggggcttttcctgctggcc

SEQ ID NO: 925 - DNA, 51 bp, Artificial Sequence
  Synthetic polynucleotide
tctgttgcaggctcctgtggctgtcytgtcatgatattgtttgcctctgaa

SEQ ID NO: 926 - DNA, 51 bp, Artificial Sequence
  Synthetic polynucleotide
gctgtggccagggaacaccttgaacyccttaagcatatgcacactgtgggg

SEQ ID NO: 927 - DNA, 51 bp, Artificial Sequence
  Synthetic polynucleotide
ccaccagtccattcgtcagcccagaytgtcagcaaacacctggtaagtgct

SEQ ID NO: 928 - DNA, 51 bp, Artificial Sequence
  Synthetic polynucleotide
atccaggtggccacagaccatgcaayacagctcaagatcgaagccctcagc

SEQ ID NO: 929 - DNA, 51 bp, Artificial Sequence
  Synthetic polynucleotide
agtgcacacaactccacagagtttcycatctacgaaagaggagtcgaggtt

SEQ ID NO: 930 - DNA, 51 bp, Artificial Sequence
  Synthetic polynucleotide
agcctcatcgagttcagcaccatccyggagggccgcctgggcagcaagtgg

SEQ ID NO: 931 - DNA, 51 bp, Artificial Sequence
  Synthetic polynucleotide
gatcaaaggaattttatacattgacycagtcggattcaatggacggtcaca

SEQ ID NO: 932 - DNA, 51 bp, Artificial Sequence
  Synthetic polynucleotide
accacttttgaagaagctcttgaaayggcatctcgtggagatagcaccaaa

SEQ ID NO: 933 - DNA, 51 bp, Artificial Sequence
  Synthetic polynucleotide
tgtgcagctgctgctcgtggcagccyggagcatgggctgtggtgagtgggc

SEQ ID NO: 934 - DNA, 51 bp, Artificial Sequence
  Synthetic polynucleotide
ggtgacccgctcctgctccagctccygtgtggccaccgaccccgacagcat

SEQ ID NO: 935 - DNA, 51 bp, Artificial Sequence
  Synthetic polynucleotide
cttcgggaggaggtgctaggagaacbgtcaaatgtggagcaagcagctggc

SEQ ID NO: 936 - DNA, 51 bp, Artificial Sequence
  Synthetic polynucleotide
ccggactctgggatcggcggcgctaygagttctttcgaggggcagatggcc

SEQ ID NO: 937 - DNA, 51 bp, Artificial Sequence
  Synthetic polynucleotide
cagatacaggaggcccgagccgactyagcccgcagggggctgcgcttctga

SEQ ID NO: 938 - DNA, 51 bp, Artificial Sequence
  Synthetic polynucleotide
gccttccaagtgctggtctcacagcyaaagattgtcctcaatgtttcaacc

SEQ ID NO: 939 - DNA, 51 bp, Artificial Sequence
  Synthetic polynucleotide
tggaagcatccctagcacagatatcyacaaaagtaccaagaattacaaaaa

SEQ ID NO: 940 - DNA, 51 bp, Artificial Sequence
  Synthetic polynucleotide
ctttcccttcgaccaaggtgtctgtygctccgtaaataaaacgtcccactg

SEQ ID NO: 941 - DNA, 51 bp, Artificial Sequence
  Synthetic polynucleotide
atttttcacttaaaaactcactagghttttgcctcctgaacttccacctgt

SEQ ID NO: 942 - DNA, 51 bp, Artificial Sequence
  Synthetic polynucleotide
aacaaagatttttttaatatgtttcyatcctgtgtcacagtttgaaattgt

SEQ ID NO: 943 - DNA, 51 bp, Artificial Sequence
  Synthetic polynucleotide
aaagctgagcaacatgacagcacaayagaggaggaacaaagatttttttaa

SEQ ID NO: 944 - DNA, 51 bp, Artificial Sequence
  Synthetic polynucleotide
gcgaccaccgggagatcacgaaaggyaccgcgggcctcgcgcgggcgccct

SEQ ID NO: 945 - DNA, 51 bp, Artificial Sequence
  Synthetic polynucleotide
agtggctgcaatgcacgcctcacctycaacatcactgcgggcaaccgcgag

SEQ ID NO: 946 - DNA, 51 bp, Artificial Sequence
  Synthetic polynucleotide
gtggacgtacttgctgagcctcatcytcaaggccgccgtggatgctggctt

SEQ ID NO: 947 - DNA, 51 bp, Artificial Sequence
  Synthetic polynucleotide
ttttggccgaggtccgctgtatccayggctctcctgaccaatctactgccc

SEQ ID NO: 948 - DNA, 51 bp, Artificial Sequence
  Synthetic polynucleotide
cgcgaccgcaacaagtatgggttgcyggcgcgcctcgcagtggaagccggc

SEQ ID NO: 949 - DNA, 51 bp, Artificial Sequence
  Synthetic polynucleotide
gtgatgagcagaagatacctctgcayggatttcagaggcaacatttttgga

SEQ ID NO: 950 - DNA, 51 bp, Artificial Sequence
  Synthetic polynucleotide
tgctatgcagctatgaaaaagaaaayctacgccatgggtggaggctcctac

SEQ ID NO: 951 - DNA, 51 bp, Artificial Sequence
  Synthetic polynucleotide
cagtggggggcggctgctctcagctycacccgtggatgctgctatccgggt

SEQ ID NO: 952 - DNA, 51 bp, Artificial Sequence
  Synthetic polynucleotide
taccgcctggtgcgcttcgaggaccyggcgcgggagccgctggcagaaatc

SEQ ID NO: 953 - DNA, 51 bp, Artificial Sequence
  Synthetic polynucleotide
gtggcggaagtctatctcgtccatcyccatgccagtgtgtacgcactcttt

SEQ ID NO: 954 - DNA, 51 bp, Artificial Sequence
  Synthetic polynucleotide
ccctggccgctgctaccgcgtcaccyggttcacctcctggagcccctgcta

SEQ ID NO: 955 - DNA, 51 bp, Artificial Sequence
  Synthetic polynucleotide
ctgcgagggaaccccaacctcagtcygaggatcttcaccgcgcgcctctac

SEQ ID NO: 956 - DNA, 51 bp, Artificial Sequence
  Synthetic polynucleotide
gattatttttactgctggaatacttytgtagaaaaccacgaaagaactttc

SEQ ID NO: 957 - DNA, 51 bp, Artificial Sequence
  Synthetic polynucleotide
atcattctgcaatttatccctgagaygatttttatcctgtgtctgtttgga

SEQ ID NO: 958 - DNA, 51 bp, Artificial Sequence
  Synthetic polynucleotide
gctgtcaaggaggatgcagtcgagaygctggccagctacgggctggcgtac

SEQ ID NO: 959 - DNA, 51 bp, Artificial Sequence
  Synthetic polynucleotide
tgtttgatgtctttctccccagctcygtttcgtgatgttttggacacccaa

SEQ ID NO: 960 - DNA, 51 bp, Artificial Sequence
  Synthetic polynucleotide
gtgagggcgcatctcaccgggtggcygatgacactgaagaaaaccttcgtc

SEQ ID NO: 961 - DNA, 51 bp, Artificial Sequence
  Synthetic polynucleotide
acaaaaaacgactattgggcgatgcyggcttataacaggtccaagctctgc

SEQ ID NO: 962 - DNA, 51 bp, Artificial Sequence
  Synthetic polynucleotide
cagcggattcctctgtcccaagtggyaggttcttaaagagacccgcgatgg

SEQ ID NO: 963 - DNA, 51 bp, Artificial Sequence
  Synthetic polynucleotide
gacgggcgcactagcagcagggcgcyggtgcctggcggttcccctaggggc

SEQ ID NO: 964 - DNA, 51 bp, Artificial Sequence
  Synthetic polynucleotide
gaaaaggaactgggacttaccaagcygctggatcccgaaggtggggccaga

SEQ ID NO: 965 - DNA, 51 bp, Artificial Sequence
  Synthetic polynucleotide
gcaccctaagcaatgtgcatacttcygtgagaacaagctcaggagcccagt

SEQ ID NO: 966 - DNA, 51 bp, Artificial Sequence
  Synthetic polynucleotide
gaaaatgcagtcttggaccagctgcytaacctaggaaggcagctaatcagt

SEQ ID NO: 967 - DNA, 51 bp, Artificial Sequence
  Synthetic polynucleotide
aatggcgtgtcatccacccaggaccrgtccccttccatccctgctttagtc

SEQ ID NO: 968 - DNA, 51 bp, Artificial Sequence
  Synthetic polynucleotide
tgtggaaaagaaggagagagaatacyctgaacagctaatcgataatgtgcg

SEQ ID NO: 969 - DNA, 51 bp, Artificial Sequence
  Synthetic polynucleotide
aaattttgcccaccgctctgtaccayggagaagtttgcttcctactgcctc

SEQ ID NO: 970 - DNA, 51 bp, Artificial Sequence
  Synthetic polynucleotide
cgagaaggccataatgacctatgtgyccagcttctaccatgccttttcagg

SEQ ID NO: 971 - DNA, 51 bp, Artificial Sequence
  Synthetic polynucleotide
agcgaagccaaaatgccctgccgtgygtacttgtaccaaagataatgcttt

SEQ ID NO: 972 - DNA, 51 bp, Artificial Sequence
  Synthetic polynucleotide
gcagaatttgcaaagtctcaagaccygccttatcaatcattgtccatagac

SEQ ID NO: 973 - DNA, 51 bp, Artificial Sequence
  Synthetic polynucleotide
gcaaacctgcgtcaacacctacggcyctttcatctgccgctgtgacccagg

SEQ ID NO: 974 - DNA, 51 bp, Artificial Sequence
  Synthetic polynucleotide
ttgcttgcatttctgtttccagacaytgatgaatgtcgctatggttactgc

SEQ ID NO: 975 - DNA, 51 bp, Artificial Sequence
  Synthetic polynucleotide
gttttctgtattggtgtgttttgtaycttgcttgaacttcctgttcttctt

SEQ ID NO: 976 - DNA, 51 bp, Artificial Sequence
  Synthetic polynucleotide
gagctagcctcctatgatatgcggcygaggtaggtggtctgggtggggtga

SEQ ID NO: 977 - DNA, 51 bp, Artificial Sequence
  Synthetic polynucleotide
aatggattatacttactatgcagtayggcccgatcctgatttagttcatga

SEQ ID NO: 978 - DNA, 51 bp, Artificial Sequence
  Synthetic polynucleotide
aagtgagtcttggcttaagaatgcayggcattttattagtgaatctgtaag

SEQ ID NO: 979 - DNA, 51 bp, Artificial Sequence
  Synthetic polynucleotide
cagatggtatcagctggtgaactctytgaccctgatatagaagtactaaag

SEQ ID NO: 980 - DNA, 51 bp, Artificial Sequence
  Synthetic polynucleotide
gagccgcttgggccggggcaagcgcycgctagtgctggacctgaagcagcc

SEQ ID NO: 981 - DNA, 51 bp, Artificial Sequence
  Synthetic polynucleotide
aatccaaggcttatttatgccaggcygagtggatttggccagtcaggaagc

SEQ ID NO: 982 - DNA, 51 bp, Artificial Sequence
  Synthetic polynucleotide
gacagaggaacaaaggagactcttayggtcagtaccaccatgagaatgtga

SEQ ID NO: 983 - DNA, 51 bp, Artificial Sequence
  Synthetic polynucleotide
tactctgatcctcaactactgccagygcctgctgaagaaggaggagtacta

SEQ ID NO: 984 - DNA, 51 bp, Artificial Sequence
  Synthetic polynucleotide
ctctcatttgctttagccagtcgtcygggattgtattccaaaacttcccag

SEQ ID NO: 985 - DNA, 51 bp, Artificial Sequence
  Synthetic polynucleotide
gaagtgggtcctaaaaactcttacaytgcatacatagaagatcacagtggc

SEQ ID NO: 986 - DNA, 51 bp, Artificial Sequence
  Synthetic polynucleotide
acctatgtcggcggcatcctgctgcyctccaagcagcactaccggctggtg

SEQ ID NO: 987 - DNA, 51 bp, Artificial Sequence
  Synthetic polynucleotide
atctacaggcatcgacatcctgtacycgggctcccagaaggccctgaacgc

SEQ ID NO: 988 - DNA, 51 bp, Artificial Sequence
  Synthetic polynucleotide
aagcccttctccttctacctggacaycaagtggctggccaacttctggggc

SEQ ID NO: 989 - DNA, 51 bp, Artificial Sequence
  Synthetic polynucleotide
acatggcacgaagtgaccctttccaygacagacccactgtcccagacctcc

SEQ ID NO: 990 - DNA, 51 bp, Artificial Sequence
  Synthetic polynucleotide
acactgtgaactcaacatcgatgaaygcttttcaaacccctgtatccatgg

SEQ ID NO: 991 - DNA, 51 bp, Artificial Sequence
  Synthetic polynucleotide
agataaactgttctacatctacacayccggcaccacagggctgcccaaggc

SEQ ID NO: 992 - DNA, 51 bp, Artificial Sequence
  Synthetic polynucleotide
cgctggtacgtgacggtgttcccgtygcgcgccctgcaccgccgcacgccc

SEQ ID NO: 993 - DNA, 51 bp, Artificial Sequence
  Synthetic polynucleotide
tgctgcgtccccttcacggccctgcygtacccgctgcccggctgggtgctg

SEQ ID NO: 994 - DNA, 51 bp, Artificial Sequence
  Synthetic polynucleotide
atctccatcatcgtgggcaccatcaytggctctgggatcttcgtttccccc

SEQ ID NO: 995 - DNA, 51 bp, Artificial Sequence
  Synthetic polynucleotide
tggtgtccagcagcatccggcttcayggggggacttgaaccctgcagcagg

SEQ ID NO: 996 - DNA, 51 bp, Artificial Sequence
  Synthetic polynucleotide
caggagggcaaggtgcagtttgtgaytgatgcggtgtacgccattgcccac

SEQ ID NO: 997 - DNA, 51 bp, Artificial Sequence
  Synthetic polynucleotide
gttttccaaaggaggctaccagataygcaggcgtcacaaagactgtgaggg

SEQ ID NO: 998 - DNA, 51 bp, Artificial Sequence
  Synthetic polynucleotide
cccaaccaagatgcgagtggaacgaygggccttcaacttcagcgaattgat

SEQ ID NO: 999 - DNA, 51 bp, Artificial Sequence
  Synthetic polynucleotide
ctccagacgatcaccatctgcttccyggtcatgcactacagaggacagact

SEQ ID NO: 1000 - DNA, 51 bp, Artificial Sequence
  Synthetic polynucleotide
actggcggaagctagctttgcaatayggcggccgaggcggacggaccgctt

SEQ ID NO: 1001 - DNA, 51 bp, Artificial Sequence
  Synthetic polynucleotide
ctgggagccaagagtgctgaagggtygagtctccagtctgtaatgctggag

SEQ ID NO: 1002 - DNA, 51 bp, Artificial Sequence
  Synthetic polynucleotide
acgctgaacatgctcatcaagatcaytggcaattcagtgggggcgctgggt

SEQ ID NO: 1003 - DNA, 51 bp, Artificial Sequence
  Synthetic polynucleotide
gctgggtttggatttctcaccctgcyccttggtcttgactgcgtgaaattc

SEQ ID NO: 1004 - DNA, 51 bp, Artificial Sequence
  Synthetic polynucleotide
atatgccctggtcttccagtgaagcyggtggtaactcgagcgttgatgatt

SEQ ID NO: 1005 - DNA, 51 bp, Artificial Sequence
  Synthetic polynucleotide
ctttcttccatagctgctaaaggccyggagccctgtttttaggaactacat

SEQ ID NO: 1006 - DNA, 51 bp, Artificial Sequence
  Synthetic polynucleotide
tattgtgaaaacccagatatagtgcygtgtggaaacaagagtgatctggag

SEQ ID NO: 1007 - DNA, 51 bp, Artificial Sequence
  Synthetic polynucleotide
cccgccctgctgggtgctgccagcayggttctggactacacaacacgcagg

SEQ ID NO: 1008 - DNA, 51 bp, Artificial Sequence
  Synthetic polynucleotide
cgctgcggccccctcaacgtgacgcyggccgcagaggcctgccgccgcaag

SEQ ID NO: 1009 - DNA, 51 bp, Artificial Sequence
  Synthetic polynucleotide
ctggtgcgcgacccccgggccgtgcyggcctcgcgcatggtggccttcgcc

SEQ ID NO: 1010 - DNA, 51 bp, Artificial Sequence
  Synthetic polynucleotide
cggcagctggagttcctgcagccgcyggccgaggacccccgcctggacctg

SEQ ID NO: 1011 - DNA, 51 bp, Artificial Sequence
  Synthetic polynucleotide
ttctactatgtcatcctgtacctcayggtgatgattggaatgttctctttc

SEQ ID NO: 1012 - DNA, 51 bp, Artificial Sequence
  Synthetic polynucleotide
gtcatcctgtacctcatggtgatgaytggaatgttctctttcatcatcgtg

SEQ ID NO: 1013 - DNA, 51 bp, Artificial Sequence
  Synthetic polynucleotide
gtacctcatggtgatgattggaatghtctctttcatcatcgtggccatcct

SEQ ID NO: 1014 - DNA, 51 bp, Artificial Sequence
  Synthetic polynucleotide
tcatcctccttgctctccccacagcycctcatcccccatacccgatacacc

SEQ ID NO: 1015 - DNA, 51 bp, Artificial Sequence
  Synthetic polynucleotide
attcggaagtggttggacaagtaagygccattgtactgtttgcgactagtt

SEQ ID NO: 1016 - DNA, 51 bp, Artificial Sequence
  Synthetic polynucleotide
gccaccggcctcactcccacacaagyaggcaactggtttaagaaccggcgg

SEQ ID NO: 1017 - DNA, 51 bp, Artificial Sequence
  Synthetic polynucleotide
tttattagtgagctaagagatgattytttaaaatttgatgacaagtttgca

SEQ ID NO: 1018 - DNA, 51 bp, Artificial Sequence
  Synthetic polynucleotide
ctgtgtcccacctgggaccagatgcyggtgttcgacaacctggagctctat

SEQ ID NO: 1019 - DNA, 51 bp, Artificial Sequence
  Synthetic polynucleotide
gacgtggccatcggcacccacttcaytgacctgcgcaagatttctaatgac

SEQ ID NO: 1020 - DNA, 51 bp, Artificial Sequence
  Synthetic polynucleotide
gatgctggaggccatctgcaagcacygggaggggcccatcagcctggccct

SEQ ID NO: 1021 - DNA, 51 bp, Artificial Sequence
  Synthetic polynucleotide
gaggcctccatgcacagatattaagrgcttggggagttccagctgccaatc

SEQ ID NO: 1022 - DNA, 51 bp, Artificial Sequence
  Synthetic polynucleotide
acctgtttgtgtctccagattacatygacaaccatcggctatggtgacaag

SEQ ID NO: 1023 - DNA, 51 bp, Artificial Sequence
  Synthetic polynucleotide
actgaaccaccttttcccccacagcygtaccttccttggaaagagagtaga

SEQ ID NO: 1024 - DNA, 51 bp, Artificial Sequence
  Synthetic polynucleotide
cgctcgtgcctgcgttcgctgcgccycctcgtcttcgccgtcttctcagcc

SEQ ID NO: 1025 - DNA, 51 bp, Artificial Sequence
  Synthetic polynucleotide
catcccggtcactcccaagaacccgyggagcatggatgagaacctcatgca

SEQ ID NO: 1026 - DNA, 51 bp, Artificial Sequence
  Synthetic polynucleotide
acattgaacatgctgattaagatcaytggtaactcagtaggggctctaggt

SEQ ID NO: 1027 - DNA, 51 bp, Artificial Sequence
  Synthetic polynucleotide
tttctttaccttggaggtcaagacayctttatgacagaagaacagaagaaa

SEQ ID NO: 1028 - DNA, 51 bp, Artificial Sequence
  Synthetic polynucleotide
ggcaatgtttcagctcttcgaacttycagagtattgagagctttgaaaact

SEQ ID NO: 1029 - DNA, 51 bp, Artificial Sequence
  Synthetic polynucleotide
agatggctgtggatgctgtaaaatcygtgccaagcaaccaggggaaatctg

SEQ ID NO: 1030 - DNA, 51 bp, Artificial Sequence
  Synthetic polynucleotide
taaatggaagatgctgtggattacaycttgtgtgtgtcagagaaactgcag

SEQ ID NO: 1031 - DNA, 51 bp, Artificial Sequence
  Synthetic polynucleotide
cgagcactcagttatgacttacctgycccagttccccaaagccaagctcaa

SEQ ID NO: 1032 - DNA, 51 bp, Artificial Sequence
  Synthetic polynucleotide
  misc_feature (26)..(26): n is a, c, g, t or u
gatttgttactgacaaggcctagggnaagttttcacagcctaaaacacagt

SEQ ID NO: 1033 - DNA, 51 bp, Artificial Sequence
  Synthetic polynucleotide
tacaagacctaagttccaagaagcarcagtcccacaacattctggatctgc

SEQ ID NO: 1034 - DNA, 51 bp, Artificial Sequence
  Synthetic polynucleotide
ggtcaccatcatgtccataatgctgyggtatgtaaaagagacctgcctgag

SEQ ID NO: 1035 - DNA, 51 bp, Artificial Sequence
  Synthetic polynucleotide
atgcctcagacaaaattcaaagcctrtgtcatcagagagtgaaaaggatat

SEQ ID NO: 1036 - DNA, 51 bp, Artificial Sequence
  Synthetic polynucleotide
ggctgttgtgggaaatatggactctygtggggaatctctccagatcttaag

SEQ ID NO: 1037 - DNA, 51 bp, Artificial Sequence
  Synthetic polynucleotide
tgccaagaggatggctgtgttgatcytcaccgacttcatatgcatggcccc

SEQ ID NO: 1038 - DNA, 51 bp, Artificial Sequence
  Synthetic polynucleotide
aaactgaacgtcccccgctttctcaygtgcaacctggcctttgcggatttc

SEQ ID NO: 1039 - DNA, 51 bp, Artificial Sequence
  Synthetic polynucleotide
actgtctttgcaagcgagttatcggygtatacgctgacggtcatcaccctg

SEQ ID NO: 1040 - DNA, 51 bp, Artificial Sequence
  Synthetic polynucleotide
agttgccttcgtcatcgtctgctgcygttatgtgaagatctacatcacagt

SEQ ID NO: 1041 - DNA, 51 bp, Artificial Sequence
  Synthetic polynucleotide
gcggatttctgcatggggatgtaccygctcctcatcgcctctgtagacctc

SEQ ID NO: 1042 - DNA, 51 bp, Artificial Sequence
  Synthetic polynucleotide
cagaaatgtttgcaacacaaggacaytcctgtccccaagggctttctgact

SEQ ID NO: 1043 - DNA, 51 bp, Artificial Sequence
  Synthetic polynucleotide
tccgtggtgttcgtcttccgggtgcyggtatacgtggtggctgcagagcgc

SEQ ID NO: 1044 - DNA, 51 bp, Artificial Sequence
  Synthetic polynucleotide
gatttgctcagagtagctgatacaaytgtagccaaagctgccgaccttaaa

SEQ ID NO: 1045 - DNA, 51 bp, Artificial Sequence
  Synthetic polynucleotide
ctggctctatgagagacttgcacctyaactctgggacctgctggcccagag

SEQ ID NO: 1046 - DNA, 51 bp, Artificial Sequence
  Synthetic polynucleotide
ccgacgctgctttgaggcccggatcygtgcttgcccaggaagagacaggaa

SEQ ID NO: 1047 - DNA, 51 bp, Artificial Sequence
  Synthetic polynucleotide
cctccgtatcccacagattgcagcaytgtcaggtgagtccacagcatgtgc

SEQ ID NO: 1048 - DNA, 51 bp, Artificial Sequence
  Synthetic polynucleotide
caccatctatcagattgagcattacbccatggatgtaagtaactgttagac

SEQ ID NO: 1049 - DNA, 51 bp, Artificial Sequence
  Synthetic polynucleotide
catccagtctcaaatgctttctagayggtctgcttctttcacagtaactag

SEQ ID NO: 1050 - DNA, 51 bp, Artificial Sequence
  Synthetic polynucleotide
gcacctctggatgacctgaaagatayggcttctaaaccgaaggagtctcat

SEQ ID NO: 1051 - DNA, 51 bp, Artificial Sequence
  Synthetic polynucleotide
acaggaacagtcacagtgcaggtgcyggaagccatccccaccagcggcctc

SEQ ID NO: 1052 - DNA, 51 bp, Artificial Sequence
  Synthetic polynucleotide
aatcagctaagtgtagccacattacygtttgagggggatcgtgagaaggtt

SEQ ID NO: 1053 - DNA, 51 bp, Artificial Sequence
  Synthetic polynucleotide
gggagagtttggggtgtacctggtgyctgatggcagcagccgcccttatcg

SEQ ID NO: 1054 - DNA, 51 bp, Artificial Sequence
  Synthetic polynucleotide
ccagtggtttggcgatggcaagttcyccgaggtgagtccggggaagggcaa

SEQ ID NO: 1055 - DNA, 51 bp, Artificial Sequence
  Synthetic polynucleotide
caaatatatgccctctgcaaccaatyttatacacctgcagctactggactc

SEQ ID NO: 1056 - DNA, 51 bp, Artificial Sequence
  Synthetic polynucleotide
aatgatgaggccacagtgtctgttcytggggagcttgcagcagaaatgaat

SEQ ID NO: 1057 - DNA, 51 bp, Artificial Sequence
  Synthetic polynucleotide
acagaatcttgctgctgagaaaacayacaataacctagatatcacggtgac

SEQ ID NO: 1058 - DNA, 51 bp, Artificial Sequence
  Synthetic polynucleotide
tagtattgtgggtattatttccctgycggacattctgcaagccctgatcct

SEQ ID NO: 1059 - DNA, 51 bp, Artificial Sequence
  Synthetic polynucleotide
ttcaagctgttccgggccctgggccygcggcacctggtggtggtggacaac

SEQ ID NO: 1060 - DNA, 51 bp, Artificial Sequence
  Synthetic polynucleotide
ggcaggacagagcttggagctgccgygcgtggcccgagggggtaatccctt

SEQ ID NO: 1061 - DNA, 51 bp, Artificial Sequence
  Synthetic polynucleotide
ctttcagctttaacctttgctgggcyttgctatttcaactatcacgatgtg

SEQ ID NO: 1062 - DNA, 51 bp, Artificial Sequence
  Synthetic polynucleotide
taatggcctggcccaggggctgggcyggcccccatgtgggaaggtcctgcg

SEQ ID NO: 1063 - DNA, 51 bp, Artificial Sequence
  Synthetic polynucleotide
ggaagggcgctaccttgagatagagytctgcttgaaacataggagctgccc

SEQ ID NO: 1064 - DNA, 51 bp, Artificial Sequence
  Synthetic polynucleotide
gggcgtgaggatcaatgacagacagbgcaccggcatcgagggggaagattt

SEQ ID NO: 1065 - DNA, 51 bp, Artificial Sequence
  Synthetic polynucleotide
cctgggaccagcttcgagtttgcgcytgcaattgttgaagccctgaatggc

SEQ ID NO: 1066 - DNA, 51 bp, Artificial Sequence
  Synthetic polynucleotide
gctcgcctggaccacaagtttgaccygatgtatgccaaacgtgcctttgtt

SEQ ID NO: 1067 - DNA, 51 bp, Artificial Sequence
  Synthetic polynucleotide
ctcaagatccccggcgtgggctcgcygagccaaagcaccatctgcaggttc

SEQ ID NO: 1068 - DNA, 51 bp, Artificial Sequence
  Synthetic polynucleotide
tggtgaagatgaaaatattctcttcyctccattgagtattgctcttgcaat

SEQ ID NO: 1069 - DNA, 51 bp, Artificial Sequence
  Synthetic polynucleotide
ttcgtgcgcggccgcgagcagctacyggagcgcgtgcggcgcaaggtgggg

SEQ ID NO: 1070 - DNA, 51 bp, Artificial Sequence
  Synthetic polynucleotide
aatagcaacagtggcccaaatgagaytggaaattttggccgtggaggtaag

SEQ ID NO: 1071 - DNA, 51 bp, Artificial Sequence
  Synthetic polynucleotide
actttgcaacagtggaggaaagcctytggagtgataccacaggtgagcaaa

SEQ ID NO: 1072 - DNA, 51 bp, Artificial Sequence
  Synthetic polynucleotide
tggatcagggaagagtactttgttaycagcttttttgagactactgaacac

SEQ ID NO: 1073 - DNA, 51 bp, Artificial Sequence
  Synthetic polynucleotide
acaagcttaaaaggactatggacacbtcgtgccttcggacggcagccttac

SEQ ID NO: 1074 - DNA, 51 bp, Artificial Sequence
  Synthetic polynucleotide
tgtctgccattcttaaaaacaaaaaygttgttatttttatttcagatgcga

SEQ ID NO: 1075 - DNA, 51 bp, Artificial Sequence
  Synthetic polynucleotide
ttttggagaaacacaagttttccttyggatgctgataaaattttgttacgt

SEQ ID NO: 1076 - DNA, 51 bp, Artificial Sequence
  Synthetic polynucleotide
gaggagattgaaaaagacttaattgygagttttagccttaataactttttc

SEQ ID NO: 1077 - DNA, 51 bp, Artificial Sequence
  Synthetic polynucleotide
accctatgcctttgctacaaggaaaytgaagaaaaagaatttacagaatgg

SEQ ID NO: 1078 - DNA, 51 bp, Artificial Sequence
  Synthetic polynucleotide
cgcagcacggagtctcggcgtcccayggcgcaacctacggcctcggcccag

SEQ ID NO: 1079 - DNA, 51 bp, Artificial Sequence
  Synthetic polynucleotide
ggtcacccaggcctcagtcaagaacytccagattgtccacgctgatgaccg

SEQ ID NO: 1080 - DNA, 51 bp, Artificial Sequence
  Synthetic polynucleotide
ctcctggggaaccgcttcacggtctytgacaacgggcagaacccacagcgt

SEQ ID NO: 1081 - DNA, 51 bp, Artificial Sequence
  Synthetic polynucleotide
tcttacggcaaggtgaaggaggtgcyggactcggagacgctgtgcaggagg

SEQ ID NO: 1082 - DNA, 51 bp, Artificial Sequence
  Synthetic polynucleotide
tggcttccgctacatcagtgaggaaygtccactggccattgtgcttcttat

SEQ ID NO: 1083 - DNA, 51 bp, Artificial Sequence
  Synthetic polynucleotide
tctgtaggccgactgctcgagctgcytaccaagctgggccgcgacgacgtg

SEQ ID NO: 1084 - DNA, 51 bp, Artificial Sequence
  Synthetic polynucleotide
ccatctgttgtcctgctggatgaccytgacctcattgctggactgcctgct

SEQ ID NO: 1085 - DNA, 51 bp, Artificial Sequence
  Synthetic polynucleotide
ggagcggccccagactcgtaaattayggccgcatctccgcacactctctcc

SEQ ID NO: 1086 - DNA, 51 bp, Artificial Sequence
  Synthetic polynucleotide
tgtcagcagcgaatcctctgacagcyccgaggaactttctcccacggccaa

SEQ ID NO: 1087 - DNA, 51 bp, Artificial Sequence
  Synthetic polynucleotide
caaatttgacagccaggaagatctgyggaccaaaatcattctggctcggga

SEQ ID NO: 1088 - DNA, 51 bp, Artificial Sequence
  Synthetic polynucleotide
ctgtggggttgcgtgcccggggagcygccctcgccagggaaggtgcgcagc

SEQ ID NO: 1089 - DNA, 51 bp, Artificial Sequence
  Synthetic polynucleotide
cgggtacttcatgcccatctttgtcyatggtgagtctggggtcctgaggtt

SEQ ID NO: 1090 - DNA, 51 bp, Artificial Sequence
  Synthetic polynucleotide
tgtggggcctcgggtcagttcgagtyggagatcctgtccatgcagaacgtg

SEQ ID NO: 1091 - DNA, 51 bp, Artificial Sequence
  Synthetic polynucleotide
acttgctccttttcaattgagagaaycttaggactggaccagaagaaagac

SEQ ID NO: 1092 - DNA, 51 bp, Artificial Sequence
  Synthetic polynucleotide
tcattattgggtgaaaaaacttcccdcctggttttgagtaaaagcagttct

SEQ ID NO: 1093 - DNA, 51 bp, Artificial Sequence
  Synthetic polynucleotide
cttgatggccaaacaacaggacttayacctgcgaattatgtcaaaattctt

SEQ ID NO: 1094 - DNA, 51 bp, Artificial Sequence
  Synthetic polynucleotide
aatgggatgttaaacgtgtcccctaytggaagaagctgcagccaagaagaa

SEQ ID NO: 1095 - DNA, 51 bp, Artificial Sequence
  Synthetic polynucleotide
aggcagaagatcaaaatcggagtggyaggcggatcggactttgagaaagtg

SEQ ID NO: 1096 - DNA, 51 bp, Artificial Sequence
  Synthetic polynucleotide
cgccttctcctctctgtccccagcaygggcaccagcctcagcccgaacgac

SEQ ID NO: 1097 - DNA, 51 bp, Artificial Sequence
  Synthetic polynucleotide
aaagactcgcttcccaaaactgaaayggtgagtgggtcatacagaatgggt

SEQ ID NO: 1098 - DNA, 51 bp, Artificial Sequence
  Synthetic polynucleotide
ggttcagaatgttgcaaatacaaaaytgacaacccggaagaaaaggcattg

SEQ ID NO: 1099 - DNA, 51 bp, Artificial Sequence
  Synthetic polynucleotide
tgacaatcatgttgcagcaattcacbgtaaagctggaaagggacgaactgg

SEQ ID NO: 1100 - DNA, 51 bp, Artificial Sequence
  Synthetic polynucleotide
aaaaaccattacaagatatacaatcygtaagtatgttttcttatttgtatg

SEQ ID NO: 1101 - DNA, 51 bp, Artificial Sequence
  Synthetic polynucleotide
ttttgtgaagatcttgaccaatggcyaagtgaagatgacaatcatgttgca

SEQ ID NO: 1102 - DNA, 51 bp, Artificial Sequence
  Synthetic polynucleotide
cgacgggaagacaagttcatgtactytgagttccctcagccgttacctgtg

SEQ ID NO: 1103 - DNA, 51 bp, Artificial Sequence
  Synthetic polynucleotide
ttggcccacgccgtcctggccaagchgaacgccttcaaggcagacactccc

SEQ ID NO: 1104 - DNA, 51 bp, Artificial Sequence
  Synthetic polynucleotide
aaccgggaaggagtctacacagtctytgctcccacaaatgaagccttccga

SEQ ID NO: 1105 - DNA, 51 bp, Artificial Sequence
  Synthetic polynucleotide
cagctcacccaacgtgccctctctcyactggaggaaaacatgttctgggcc

SEQ ID NO: 1106 - DNA, 51 bp, Artificial Sequence
  Synthetic polynucleotide
ggaaataaaactgacatcttaaggcyacatgaactaaccaaggtaagggaa

SEQ ID NO: 1107 - DNA, 51 bp, Artificial Sequence
  Synthetic polynucleotide
ctttgttaacacagccatccttgaaycaattgaaaaagaagaaaacatggg

SEQ ID NO: 1108 - DNA, 51 bp, Artificial Sequence
  Synthetic polynucleotide
ctttctggatcagaaaaagaaactaygcaaaatcttaatgatagattagct

SEQ ID NO: 1109 - DNA, 51 bp, Artificial Sequence
  Synthetic polynucleotide
gttgacactggccctgaaagcactcycgctcattcactcccggtgaggctc

SEQ ID NO: 1110 - DNA, 51 bp, Artificial Sequence
  Synthetic polynucleotide
tgccttcatcatctgtggcaccttgyacaccgtcagcagctacacctcagc

SEQ ID NO: 1111 - DNA, 51 bp, Artificial Sequence
  Synthetic polynucleotide
gtcagtcgccaatgccttcatcatcygtggcaccttgtacaccgtcagcag

SEQ ID NO: 1112 - DNA, 51 bp, Artificial Sequence
  Synthetic polynucleotide
gattattcccctttaatccgtgttaytggaagagttttttctagtgctgag

SEQ ID NO: 1113 - DNA, 51 bp, Artificial Sequence
  Synthetic polynucleotide
tcgctgaacgaggcgttcgccgcgcygcggaagatcatccccacgctgccc

SEQ ID NO: 1114 - DNA, 51 bp, Artificial Sequence
  Synthetic polynucleotide
tccttcttgcagggcatggagggaaycaaagtgtttctccatgaaagagaa

SEQ ID NO: 1115 - DNA, 51 bp, Artificial Sequence
  Synthetic polynucleotide
gactgctcgacacccccgaacccgcbacagcccaggttgggatgccaagct

SEQ ID NO: 1116 - DNA, 51 bp, Artificial Sequence
  Synthetic polynucleotide
gtcactgagacagtgcgcagggcacytgtgatcaacatgcgaggtgagaca

SEQ ID NO: 1117 - DNA, 51 bp, Artificial Sequence
  Synthetic polynucleotide
atggaccccgtggcccggcgcctgcyttgggacaccgtggcacgagcccga

SEQ ID NO: 1118 - DNA, 51 bp, Artificial Sequence
  Synthetic polynucleotide
atcgccgcctccttcatgaccctgcycttctgtgtcaaggtgagcatggcg

SEQ ID NO: 1119 - DNA, 51 bp, Artificial Sequence
  Synthetic polynucleotide
ctgcctctccccagagtcctgcctcygccccctggagatgaatgtggccca

SEQ ID NO: 1120 - DNA, 51 bp, Artificial Sequence
  Synthetic polynucleotide
accaagcagcagatcgagaaggggcyccagctgtaccagtccaaccagaca

SEQ ID NO: 1121 - DNA, 51 bp, Artificial Sequence
  Synthetic polynucleotide
atcatgaccgagatcggaaaccgccyggggcaggtgcaggcgctgctgggt

SEQ ID NO: 1122 - DNA, 51 bp, Artificial Sequence
  Synthetic polynucleotide
aatgccttcctgggcctcagcgtctyccagaaggccctggagagcttcgag

SEQ ID NO: 1123 - DNA, 51 bp, Artificial Sequence
  Synthetic polynucleotide
ctcctccgcgttccagaatccaagayggcgggatccaggcaaaggggtctc

SEQ ID NO: 1124 - DNA, 51 bp, Artificial Sequence
  Synthetic polynucleotide
cagcggcaagcttctggcttcctgtyctgcagatatgaccattaaactatg

SEQ ID NO: 1125 - DNA, 51 bp, Artificial Sequence
  Synthetic polynucleotide
ggctatgaagaggcatattcagtttytaaaaaggaagctgaattagatgtg

SEQ ID NO: 1126 - DNA, 51 bp, Artificial Sequence
  Synthetic polynucleotide
cagttggaacagctggagtcagcctytgggaggaaccagtaccccgacatc

SEQ ID NO: 1127 - DNA, 51 bp, Artificial Sequence
  Synthetic polynucleotide
gaactttttacccctgaatgcaagtytaaagaatctgtttttgaaaattat

SEQ ID NO: 1128 - DNA, 51 bp, Artificial Sequence
  Synthetic polynucleotide
gtggctggagggtaacccctgggacygtggctgccctctcaaggcgctgcg

SEQ ID NO: 1129 - DNA, 51 bp, Artificial Sequence
  Synthetic polynucleotide
cccttgcctgttccgtccctagactycttctcggattctcctcctgaccaa

SEQ ID NO: 1130 - DNA, 51 bp, Artificial Sequence
  Synthetic polynucleotide
gcactgggccccagagctaggagtcyttgcagactttgggaaccacacaaa

SEQ ID NO: 1131 - DNA, 51 bp, Artificial Sequence
  Synthetic polynucleotide
tacgtgcccaccaacggctcagcctyggtgctccaggtggactctggtgcc

SEQ ID NO: 1132 - DNA, 51 bp, Artificial Sequence
  Synthetic polynucleotide
agcccagctacgccggacaatagaaygttgtcggaccaatttatgtaacca

SEQ ID NO: 1133 - DNA, 51 bp, Artificial Sequence
  Synthetic polynucleotide
ccgagtgatccgtcatacgaagataygcgtgaggttgtgtgtgtcaaacgt

SEQ ID NO: 1134 - DNA, 51 bp, Artificial Sequence
  Synthetic polynucleotide
gtggcgggttactccctggggtttcytctggctagaattgctggtctaccc

SEQ ID NO: 1135 - DNA, 51 bp, Artificial Sequence
  Synthetic polynucleotide
caactcgccgtacatcgtgggcttcyacggggccttctacagtgacgggga

SEQ ID NO: 1136 - DNA, 51 bp, Artificial Sequence
  Synthetic polynucleotide
ctgctgggcgtcccactggccctgchctggggcttcctgttcgcctgcatc

SEQ ID NO: 1137 - DNA, 51 bp, Artificial Sequence
  Synthetic polynucleotide
ccggagaacttcaatgaagccaagthcatcaccttcagcatgctcatcttc

SEQ ID NO: 1138 - DNA, 51 bp, Artificial Sequence
  Synthetic polynucleotide
aattgattctttgaaccttgatgagytctgcaactgctcagagcacattcc

SEQ ID NO: 1139 - DNA, 51 bp, Artificial Sequence
  Synthetic polynucleotide
gagtttctgtcgtggacggagccctytgggatcgcactcaccctctttgcc

SEQ ID NO: 1140 - DNA, 51 bp, Artificial Sequence
  Synthetic polynucleotide
gcgttgcagcaccgcagctcacgctytcaaggtggctgcccgggccacgct

SEQ ID NO: 1141 - DNA, 51 bp, Artificial Sequence
  Synthetic polynucleotide
caaaacaaaattgattctttgaaccytgatgagttctgcaactgctcagag

SEQ ID NO: 1142 - DNA, 51 bp, Artificial Sequence
  Synthetic polynucleotide
cacctgcctgctggctgccatctgcytcttctttgccttcaagtcccggaa

SEQ ID NO: 1143 - DNA, 51 bp, Artificial Sequence
  Synthetic polynucleotide
agctgctgctgggtcctcttggcacycacctggcacacctctgcctacggg

SEQ ID NO: 1144 - DNA, 51 bp, Artificial Sequence
  Synthetic polynucleotide
ctggcatattccaggtgcatccaggygcgggcgtcatgctgggcttgggtc

SEQ ID NO: 1145 - DNA, 51 bp, Artificial Sequence
  Synthetic polynucleotide
ttcaccagatcccagcgcaagaaccygttcgcagagatgcgcgagcagctg

SEQ ID NO: 1146 - DNA, 51 bp, Artificial Sequence
  Synthetic polynucleotide
tgcgagttcccattgcgctcccaccyggagcccacgaatcatgcagtcatc

SEQ ID NO: 1147 - DNA, 51 bp, Artificial Sequence
  Synthetic polynucleotide
tgattcggaagccacagtccgagagygagttgccttctttccatcctaatg

SEQ ID NO: 1148 - DNA, 51 bp, Artificial Sequence
  Synthetic polynucleotide
aactggggaaacaaaggatatatccycatggctcgaaataagaacaacgcc

SEQ ID NO: 1149 - DNA, 51 bp, Artificial Sequence
  Synthetic polynucleotide
atcatcgtcctccacgtcgcggtgcyggtgctgctgttcgtctccacgatc

SEQ ID NO: 1150 - DNA, 51 bp, Artificial Sequence
  Synthetic polynucleotide
atatctatctgattctctctagcaayggatcgtgggcaatggacacgcaac

SEQ ID NO: 1151 - DNA, 51 bp, Artificial Sequence
  Synthetic polynucleotide
atctaccagttcatcatggaccgcthccccttctaccgggacaacaagcag

SEQ ID NO: 1152 - DNA, 51 bp, Artificial Sequence
  Synthetic polynucleotide
ccaagacatcaagccttgcgtgatgygaggctgccgccgcaggccctcctg

SEQ ID NO: 1153 - DNA, 51 bp, Artificial Sequence
  Synthetic polynucleotide
ctctttttttctcttagatattcagyctaaaagcagcaaggccgtggtgca

SEQ ID NO: 1154 - DNA, 51 bp, Artificial Sequence
  Synthetic polynucleotide
ctgaatgtgttcttggccatcgctgyggacaatctggccaacgcccaggag

SEQ ID NO: 1155 - DNA, 51 bp, Artificial Sequence
  Synthetic polynucleotide
gggtaccgcatggagatgtccatttyctacgtcgtctactttgtggtgttc

SEQ ID NO: 1156 - DNA, 51 bp, Artificial Sequence
  Synthetic polynucleotide
atgctcttcttcatctatgccatcaytgggatgcaggtgagtgtcgtgtcc

SEQ ID NO: 1157 - DNA, 51 bp, Artificial Sequence
  Synthetic polynucleotide
cagagctggcagaggttctaccaacygaccaagctgctggactccatgcat

SEQ ID NO: 1158 - DNA, 51 bp, Artificial Sequence
  Synthetic polynucleotide
gtggagtcggggaacgccaagccgcyctacttccaccggaagtgactgccc

SEQ ID NO: 1159 - DNA, 51 bp, Artificial Sequence
  Synthetic polynucleotide
ctcaccctcctcattccctatctccytggccgcaagaggaggtggagcaaa

SEQ ID NO: 1160 - DNA, 51 bp, Artificial Sequence
  Synthetic polynucleotide
ctggggtgcctgcgaggggctggccygcagctatggctggaacttcaccga

SEQ ID NO: 1161 - DNA, 51 bp, Artificial Sequence
  Synthetic polynucleotide
tcggtacaggctggctcctacaaccyggccctcagctactcggtgggcctc

SEQ ID NO: 1162 - DNA, 51 bp, Artificial Sequence
  Synthetic polynucleotide
tctgctggggaaaacagctgttactytaattcatcgtttacctccatctgg

SEQ ID NO: 1163 - DNA, 51 bp, Artificial Sequence
  Synthetic polynucleotide
agtttaactgggattcatgcagatayccaagtgagatgggaagcaccacgc

SEQ ID NO: 1164 - DNA, 51 bp, Artificial Sequence
  Synthetic polynucleotide
actgaggagtgcccactggccatccygatcctcatcgtgcagaacatcgtg

SEQ ID NO: 1165 - DNA, 51 bp, Artificial Sequence
  Synthetic polynucleotide
ccgctttgtgtccaagaaaggcaacygcaacgtggcccacaagaacatccg

SEQ ID NO: 1166 - DNA, 51 bp, Artificial Sequence
  Synthetic polynucleotide
accgtggtcgtgctgggcggaggcaycagcggcttggccgccagttaccac

SEQ ID NO: 1167 - DNA, 51 bp, Artificial Sequence
  Synthetic polynucleotide
aaagaatcaaaggccttgatgggacyctaccatggtcaggtcctgtgcaag

SEQ ID NO: 1168 - DNA, 51 bp, Artificial Sequence
  Synthetic polynucleotide
ctggcagtggcctgcaggaaggctcytgacagcacgacagtcgcggctcat

SEQ ID NO: 1169 - DNA, 51 bp, Artificial Sequence
  Synthetic polynucleotide
tttctgctgttgtagcacagatttahgtaatgtcaactttactgagaattt

SEQ ID NO: 1170 - DNA, 51 bp, Artificial Sequence
  Synthetic polynucleotide
catcccaggcaccccgccccccaacyatgactccctgcgtctgcagccgct

SEQ ID NO: 1171 - DNA, 51 bp, Artificial Sequence
  Synthetic polynucleotide
tcaaaggcccacgtgcattgctccgycaagtccggtgagccgccgccgggg

SEQ ID NO: 1172 - DNA, 51 bp, Artificial Sequence
  Synthetic polynucleotide
tttggccatctcggtgatgaaccagbggccaggagtgaaactgcgggtgac

SEQ ID NO: 1173 - DNA, 51 bp, Artificial Sequence
  Synthetic polynucleotide
gaccgccggctcctgcccgccgctgygcacagcgtgaccctaagcgaggag

SEQ ID NO: 1174 - DNA, 51 bp, Artificial Sequence
  Synthetic polynucleotide
aaaattatagggatcatggaagaagbtgctgatggttttaagtctaaaatc

SEQ ID NO: 1175 - DNA, 51 bp, Artificial Sequence
  Synthetic polynucleotide
aaccctcactattgactgcgtccagyttcagagaggaggcaaagaattcct

SEQ ID NO: 1176 - DNA, 51 bp, Artificial Sequence
  Synthetic polynucleotide
ggaactggatatatcaagactgagtygatttctgtgtctgaagtgtaagtg

SEQ ID NO: 1177 - DNA, 51 bp, Artificial Sequence
  Synthetic polynucleotide
aaggaccagcagccggggaccttccygctgcggttcagtgagagctcccgg

SEQ ID NO: 1178 - DNA, 51 bp, Artificial Sequence
  Synthetic polynucleotide
agggacagcaacatttactgtatctyctatgaaggtgggagaaaagaaaga

SEQ ID NO: 1179 - DNA, 51 bp, Artificial Sequence
  Synthetic polynucleotide
ctatcacaacatcgagacttccaacbtccccaagctgctaattggtaggtg

SEQ ID NO: 1180 - DNA, 51 bp, Artificial Sequence
  Synthetic polynucleotide
gctgggcagggagctcgcttccctgytccgggctggccgggagccccaggg

SEQ ID NO: 1181 - DNA, 51 bp, Artificial Sequence
  Synthetic polynucleotide
aacatctttctcattataaaggcacrtggcacagtgaggggtctccacttc

SEQ ID NO: 1182 - DNA, 51 bp, Artificial Sequence
  Synthetic polynucleotide
aacccaccctgtcatccaggacaacygcccgctggtgcggaacccagacca

SEQ ID NO: 1183 - DNA, 51 bp, Artificial Sequence
  Synthetic polynucleotide
ggacgaggacaagtggggcgatgcgygcgacaactgccggtcccagaagaa

SEQ ID NO: 1184 - DNA, 51 bp, Artificial Sequence
  Synthetic polynucleotide
atcctggagatcgattgcaccatgcycacccctgagccagttttaaagtga

SEQ ID NO: 1185 - DNA, 51 bp, Artificial Sequence
  Synthetic polynucleotide
cctcgaccgcataggccagttcaccygtatctgtatggcaggtgggtggtg

SEQ ID NO: 1186 - DNA, 51 bp, Artificial Sequence
  Synthetic polynucleotide
ctgctacggtggtactgcctccctcytcaatgctgccaactggatggagtc

SEQ ID NO: 1187 - DNA, 51 bp, Artificial Sequence
  Synthetic polynucleotide
ccagctctctgctggttactcacgayggccctcggtgacatcccaggtaga

SEQ ID NO: 1188 - DNA, 51 bp, Artificial Sequence
  Synthetic polynucleotide
atggtaatgcgaggtgtacagaaaaygaacagcaaaactgtgaccagcaca

SEQ ID NO: 1189 - DNA, 51 bp, Artificial Sequence
  Synthetic polynucleotide
cgcgtctttccacagccaggcagtcygtatcttgcaaaaacatccactctg

SEQ ID NO: 1190 - DNA, 51 bp, Artificial Sequence
  Synthetic polynucleotide
ggagacagggtttggctgaagaaatycccaggggatcagcacatagctatc

SEQ ID NO: 1191 - DNA, 51 bp, Artificial Sequence
  Synthetic polynucleotide
aatgggcagcgacacgcggcagagaycgccaacatgtcactggacatcctc

SEQ ID NO: 1192 - DNA, 51 bp, Artificial Sequence
  Synthetic polynucleotide
ctgtcacgatttgagggcatgagggyaagagaggtggctgccttcccacca

SEQ ID NO: 1193 - DNA, 51 bp, Artificial Sequence
  Synthetic polynucleotide
gagtgaggacgacttcgatatgttcyatgagatctgggagaaatttgaccc

SEQ ID NO: 1194 - DNA, 51 bp, Artificial Sequence
  Synthetic polynucleotide
cccggagagcttcagctgctcaacgycacctctgccttggaccgtgggggc

SEQ ID NO: 1195 - DNA, 51 bp, Artificial Sequence
  Synthetic polynucleotide
aggctccgagaaatgcagtctttctycggcttagaggtgactggcaaactt

SEQ ID NO: 1196 - DNA, 51 bp, Artificial Sequence
  Synthetic polynucleotide
gagaggctccgagaaatgcagtcttycttcggcttagaggtgactggcaaa

SEQ ID NO: 1197 - DNA, 51 bp, Artificial Sequence
  Synthetic polynucleotide
cttgacgataacaccttagatgtcaygaaaaagccaagatgcggggttcct

SEQ ID NO: 1198 - DNA, 51 bp, Artificial Sequence
  Synthetic polynucleotide
ctccttttgtatgactaggtacctgyactgggctgactgggatacacatgc

SEQ ID NO: 1199 - DNA, 51 bp, Artificial Sequence
  Synthetic polynucleotide
gatgacctcaggaatgtcaagaagcyaggtggcgacctgctccgggccctc

SEQ ID NO: 1200 - DNA, 51 bp, Artificial Sequence
  Synthetic polynucleotide
gtactatctgatggacctctcctacyccatgcttgatgacctcaggaatgt

SEQ ID NO: 1201 - DNA, 51 bp, Artificial Sequence
  Synthetic polynucleotide
caaaatcaagaagatgctgcctgtgygtcccccaggggcaggggggctgcc

SEQ ID NO: 1202 - DNA, 51 bp, Artificial Sequence
  Synthetic polynucleotide
ttgactgggagagaacacgtggagtyctttgcccttttgagaggagtccca

SEQ ID NO: 1203 - DNA, 51 bp, Artificial Sequence
  Synthetic polynucleotide
aacaaagccaaagcacacatcaaggygagaatttttactttcagatttgca

SEQ ID NO: 1204 - DNA, 51 bp, Artificial Sequence
  Synthetic polynucleotide
gtctttagatttacagtccaatgctycactcagccattttacctcaccccc

SEQ ID NO: 1205 - DNA, 51 bp, Artificial Sequence
  Synthetic polynucleotide
ccaaccccatggcctccatgactttytcaaaaaggtattagaaaaaccatt

SEQ ID NO: 1206 - DNA, 51 bp, Artificial Sequence
  Synthetic polynucleotide
agccaaccccatggcctccatgactytttcaaaaaggtattagaaaaacca

SEQ ID NO: 1207 - DNA, 51 bp, Artificial Sequence
  Synthetic polynucleotide
gccaaccccatggcctccatgacttyttcaaaaaggtattagaaaaaccat

SEQ ID NO: 1208 - DNA, 51 bp, Artificial Sequence
  Synthetic polynucleotide
cctcctcaaagcaatacactgaaaabgtttagacgggctcacatcacccca

SEQ ID NO: 1209 - DNA, 51 bp, Artificial Sequence
  Synthetic polynucleotide
tatcacaccccatcctaaagtaaggycagctaaataagctatcgggcccat

SEQ ID NO: 1210 - DNA, 51 bp, Artificial Sequence
  Synthetic polynucleotide
aaagattaagagaaccaacacctctytacagtgaaatgccccaactaaata

SEQ ID NO: 1211 - DNA, 51 bp, Artificial Sequence
  Synthetic polynucleotide
aaaggataacagctatccattggtcytaggccccaaaaattttggtgcaac

SEQ ID NO: 1212 - DNA, 51 bp, Artificial Sequence
  Synthetic polynucleotide
ccggtaatcgcataaaacttaaaacyttacagtcagaggttcaattcctct

SEQ ID NO: 1213 - DNA, 51 bp, Artificial Sequence
  Synthetic polynucleotide
ggtttgttaagatggcagagcccggyaatcgcataaaacttaaaactttac

SEQ ID NO: 1214 - DNA, 51 bp, Artificial Sequence
  Synthetic polynucleotide
taaaactttacagtcagaggttcaaytcctcttcttaacaacatacccatg

SEQ ID NO: 1215 - DNA, 51 bp, Artificial Sequence
  Synthetic polynucleotide
aaatatgtctgataaaagagttactytgatagagtaaataataggagctta

SEQ ID NO: 1216 - DNA, 51 bp, Artificial Sequence
  Synthetic polynucleotide
aatatgtctgataaaagagttacttygatagagtaaataataggagcttaa

SEQ ID NO: 1217 - DNA, 51 bp, Artificial Sequence
  Synthetic polynucleotide
atctattgatgagggtcttactcttytagtataaatagtaccgttaacttc

SEQ ID NO: 1218 - DNA, 51 bp, Artificial Sequence
  Synthetic polynucleotide
ggtcttactcttttagtataaatagyaccgttaacttccaattaactagtt

SEQ ID NO: 1219 - DNA, 51 bp, Artificial Sequence
  Synthetic polynucleotide
gcttaaacccccttatttctaggacyatgagaatcgaacccatccctgaga

SEQ ID NO: 1220 - DNA, 51 bp, Artificial Sequence
  Synthetic polynucleotide
cggactacaaccacgaccaatgataygaaaaaccatcgttgtatttcaact

SEQ ID NO: 1221 - DNA, 51 bp, Artificial Sequence
  Synthetic polynucleotide
tcaacagaaacaaagcatacatcatbattctcgcacggactacaaccacga

SEQ ID NO: 1222 - DNA, 51 bp, Artificial Sequence
  Synthetic polynucleotide
gggacttaaacccacaaacacttagytaacagctaagcaccctaatcaact

SEQ ID NO: 1223 - DNA, 51 bp, Artificial Sequence
  Synthetic polynucleotide
gcaccctaatcaactggcttcaatcyacttctcccgccgccgggaaaaaag

SEQ ID NO: 1224 - DNA, 51 bp, Artificial Sequence
  Synthetic polynucleotide
tcaacaatagggtttacgacctcgaygttggatcaggacatcccgatggtg

SEQ ID NO: 1225 - DNA, 51 bp, Artificial Sequence
  Synthetic polynucleotide
atcttcagcaaaccctgatgaaggcyacaaagtaagcgcaagtacccacgt

SEQ ID NO: 1226 - DNA, 51 bp, Artificial Sequence
  Synthetic polynucleotide
ctgggattagataccccactatgctyagccctaaacctcaacagttaaatc

SEQ ID NO: 1227 - DNA, 51 bp, Artificial Sequence
  Synthetic polynucleotide
ttataacaaaccctgagaaccaaaaygaacgaaaatctgttcgcttcattc

SEQ ID NO: 1228 - DNA, 51 bp, Artificial Sequence
  Synthetic polynucleotide
agcctactcattcaaccaatagcccbggccgtacgcctaaccgctaacatt

SEQ ID NO: 1229 - DNA, 51 bp, Artificial Sequence
  Synthetic polynucleotide
attaaccttccctctacacttatcaycttcacaattctaattctactgact

SEQ ID NO: 1230 - DNA, 51 bp, Artificial Sequence
  Synthetic polynucleotide
atccaagcctacgttttcacacttcbagtaagcctctacctgcacgacaac

SEQ ID NO: 1231 - DNA, 51 bp, Artificial Sequence
  Synthetic polynucleotide
aaacctagccatggccatccccttaygagcgggcacagtgattataggctt

SEQ ID NO: 1232 - DNA, 51 bp, Artificial Sequence
  Synthetic polynucleotide
tacgttttcacacttctagtaagccyctacctgcacgacaacacataatga

SEQ ID NO: 1233 - DNA, 51 bp, Artificial Sequence
  Synthetic polynucleotide
ataggctaaatcctatatatcttaayggcacatgcagcgcaagtaggtcta

SEQ ID NO: 1234 - DNA, 51 bp, Artificial Sequence
  Synthetic polynucleotide
ggtatggtctgagctatgatatcaaytggcttcctagggtttatcgtgtga

SEQ ID NO: 1235 - DNA, 51 bp, Artificial Sequence
  Synthetic polynucleotide
aaagaaccatttggatacataggtayggtctgagctatgatatcaattggc

SEQ ID NO: 1236 - DNA, 51 bp, Artificial Sequence
  Synthetic polynucleotide
catgaaacatcctatcatctgtaggytcattcatttctctaacagcagtaa

SEQ ID NO: 1237 - DNA, 51 bp, Artificial Sequence
  Synthetic polynucleotide
catcaagcccgaatgatatttcctaytcgcctacacaattctccgatccgt

SEQ ID NO: 1238 - DNA, 51 bp, Artificial Sequence
  Synthetic polynucleotide
ggccacagtaattacaaacttactayccgccatcccatacattgggacaga

SEQ ID NO: 1239 - DNA, 51 bp, Artificial Sequence
  Synthetic polynucleotide
catctccgcatgatgaaacttcggcycactccttggcgcctgcctgatcct

SEQ ID NO: 1240 - DNA, 51 bp, Artificial Sequence
  Synthetic polynucleotide
gctgtagtatatccaaagacaaccaycattccccctaaataaattaaaaaa

SEQ ID NO: 1241 - DNA, 51 bp, Artificial Sequence
  Synthetic polynucleotide
gtagtatatccaaagacaaccatcaytccccctaaataaattaaaaaaact

SEQ ID NO: 1242 - DNA, 51 bp, Artificial Sequence
  Synthetic polynucleotide
atcagttcttcaaatatctactcatyttcctaattaccatactaatcttag

SEQ ID NO: 1243 - DNA, 51 bp, Artificial Sequence
  Synthetic polynucleotide
ctcacacctcatatcctccctactaygcctagaaggaataatactatcgct

SEQ ID NO: 1244 - DNA, 51 bp, Artificial Sequence
  Synthetic polynucleotide
  misc_feature (50)..(50): n is a, c, g, t or u
atattgtgcctattgccatactagtytttgccgcctgcgaagcagcggtng

SEQ ID NO: 1245 - DNA, 51 bp, Artificial Sequence
  Synthetic polynucleotide
ttacgagtgcggcttcgaccctataycccccgcccgcgtccctttctccat

SEQ ID NO: 1246 - DNA, 51 bp, Artificial Sequence
  Synthetic polynucleotide
acaactcaacggctacatagaaaaayccaccccttacgagtgcggcttcga

SEQ ID NO: 1247 - DNA, 51 bp, Artificial Sequence
  Synthetic polynucleotide
caagcaaccgcatccataatccttcyaatagctatcctcttcaacaatata

SEQ ID NO: 1248 - DNA, 51 bp, Artificial Sequence
  Synthetic polynucleotide
tacccccgattccgctacgaccaacycatacacctcctatgaaaaaacttc

SEQ ID NO: 1249 - DNA, 51 bp, Artificial Sequence
  Synthetic polynucleotide
gcttaccgaacgaaaaattctaggcyatatacaactacgcaaaggccccaa

SEQ ID NO: 1250 - DNA, 51 bp, Artificial Sequence
  Synthetic polynucleotide
ggttcaattcctcttcttaacaacabacccatggccaacctcctactcctc

SEQ ID NO: 1251 - DNA, 51 bp, Artificial Sequence
  Synthetic polynucleotide
actagtctcaggcttcaacatcgaayacgccgcaggccccttcgccctatt

SEQ ID NO: 1252 - DNA, 51 bp, Artificial Sequence
  Synthetic polynucleotide
cttactgaagccgaaaaatggccatycttccaggaggcacagaaattacag

SEQ ID NO: 1253 - DNA, 51 bp, Artificial Sequence
  Synthetic polynucleotide
gtgaagcgacccatgaacgcattcaycgtgtggtctcgcgatcagaggcgc

SEQ ID NO: 1254 - DNA, 51 bp, Artificial Sequence
  Synthetic polynucleotide
  misc_feature (26)..(26): n is a, c, g, t or u
actctatactggtatcaacatgttcngctggtctgctgtacagctgaaaat

SEQ ID NO: 1255 - DNA, 51 bp, Artificial Sequence
  Synthetic polynucleotide
caccagatggaacaatactatcaccyagtggatatggaattgaactgcaca

SEQ ID NO: 1256 - DNA, 51 bp, Artificial Sequence
  Synthetic polynucleotide
tgtcagcccatctttctgaatgtccyggaagccattgagccaggtgtagtg

SEQ ID NO: 1257 - DNA, 51 bp, Artificial Sequence
  Synthetic polynucleotide
atcaccccccaggaattcctgtgcaygaaagcactgctactcttcagcatt

SEQ ID NO: 1258 - DNA, 51 bp, Artificial Sequence
  Synthetic polynucleotide
ctaccagctcaccaagctcctggacyccgtgcagcctgtaagcaaacgatg

SEQ ID NO: 1259 - DNA, 51 bp, Artificial Sequence
  Synthetic polynucleotide
gaagcacgcggaggccctggggctcygacccgccgcgcagccccccgcgcg

SEQ ID NO: 1260 - DNA, 51 bp, Artificial Sequence
  Synthetic polynucleotide
ttgagccgggccttgtttgcagtccrcgaagaataccagcccacatactgc

SEQ ID NO: 1261 - DNA, 51 bp, Artificial Sequence
  Synthetic polynucleotide
atagaaggctttttgttattacttcyctttggctatgaaggtatgtgctat

SEQ ID NO: 1262 - DNA, 51 bp, Artificial Sequence
  Synthetic polynucleotide
ccgagctgaggcaggcatcaggcacrcttgctgacgcactccagcagctcc

SEQ ID NO: 1263 - DNA, 51 bp, Artificial Sequence
  Synthetic polynucleotide
atctcagccaagcttgttgcaaataygctatctgtagcaggtgcagatcat

SEQ ID NO: 1264 - DNA, 51 bp, Artificial Sequence
  Synthetic polynucleotide
aatttgtatgcagagccggctgtccyaaagtggataagggagaatatctct

SEQ ID NO: 1265 - DNA, 51 bp, Artificial Sequence
  Synthetic polynucleotide
tttcctttcttgcctttctaggtgaytgacatctctatgatccttgcagaa

SEQ ID NO: 1266 - DNA, 51 bp, Artificial Sequence
  Synthetic polynucleotide
ccagttgctgtagaactcaaatctcygctgggcaagtaagtgccaggctct

SEQ ID NO: 1267 - DNA, 51 bp, Artificial Sequence
  Synthetic polynucleotide
cacctctacccctcagggcttggacygtggtcctgaaagcagcaagaagta

SEQ ID NO: 1268 - DNA, 51 bp, Artificial Sequence
  Synthetic polynucleotide
catcattttggctcccctgtgtagaytggcacttctctgtttgatgaagag

SEQ ID NO: 1269 - DNA, 51 bp, Artificial Sequence
  Synthetic polynucleotide
cattgcaaataacaatctcagctacygggatgcccccctgggaagttctta

SEQ ID NO: 1270 - DNA, 51 bp, Artificial Sequence
  Synthetic polynucleotide
attctctgaagaaatcacttctggcygtcagttgcaaaaaaaggagatcca

SEQ ID NO: 1271 - DNA, 51 bp, Artificial Sequence
  Synthetic polynucleotide
acacagatgctaaaactgcagaatcygggtaatttggaaagaaagggtcaa

SEQ ID NO: 1272 - DNA, 51 bp, Artificial Sequence
  Synthetic polynucleotide
gaaagggtgtttattcctcatggacyaattatggacaggtaagtaagatct

SEQ ID NO: 1273 - DNA, 51 bp, Artificial Sequence
  Synthetic polynucleotide
cttgctcgagatgtgatgaaggagaygggaggccatcacattgtagccctc

SEQ ID NO: 1274 - DNA, 51 bp, Artificial Sequence
  Synthetic polynucleotide
attcgcagcactcttcgcatggagtygatgggctgtgatttaaatagtaag

SEQ ID NO: 1275 - DNA, 51 bp, Artificial Sequence
  Synthetic polynucleotide
ggaccttggacagtttctactgtttygtcatatctcttcccaccaacatgg

SEQ ID NO: 1276 - DNA, 51 bp, Artificial Sequence
  Synthetic polynucleotide
agagcagaagttgaagataatatcayggtgagttaaggacagtggaattac

SEQ ID NO: 1277 - DNA, 51 bp, Artificial Sequence
  Synthetic polynucleotide
cctttcaatatatgtaattaacagayaatgtcagacaagaggaatgtcatc

SEQ ID NO: 1278 - DNA, 51 bp, Artificial Sequence
  Synthetic polynucleotide
tccttggaaatctcgccaataacttyccttactgctcaaacactcttgatg

SEQ ID NO: 1279 - DNA, 51 bp, Artificial Sequence
  Synthetic polynucleotide
ttgatggaccttggacagtttctacygttttgtcatatctcttcccaccaa

SEQ ID NO: 1280 - DNA, 51 bp, Artificial Sequence
  Synthetic polynucleotide
ctctccttcctttatccaaattcgcycagttgccaagaagcatcctaaaac

SEQ ID NO: 1281 - DNA, 51 bp, Artificial Sequence
  Synthetic polynucleotide
atcaggaatcttgggacctttacttyatggggaagttggagacacactgtt

SEQ ID NO: 1282 - DNA, 51 bp, Artificial Sequence
  Synthetic polynucleotide
aatcaagcaagcagaccatataacayctaccctcacggaatcactgatgtc

SEQ ID NO: 1283 - DNA, 51 bp, Artificial Sequence
  Synthetic polynucleotide
ccctctcctcatctgctacaaagaayctgtagatcaaagaggaaaccaggt

SEQ ID NO: 1284 - DNA, 51 bp, Artificial Sequence
  Synthetic polynucleotide
cagttgtcagtttgtttgcatgaggyggcatactggtacattctaagcatt

SEQ ID NO: 1285 - DNA, 51 bp, Artificial Sequence
  Synthetic polynucleotide
ttctgtcttcttctctggatataccytcaaacacaaaatggtctatgaaga

SEQ ID NO: 1286 - DNA, 51 bp, Artificial Sequence
  Synthetic polynucleotide
gtttctttacttgggcaaaggacagygggccccaaagctggccagacttca

SEQ ID NO: 1287 - DNA, 51 bp, Artificial Sequence
  Synthetic polynucleotide
gtgtacgagaaaatgtggtcttacaygaaatcagcggagccatctgtgttt

SEQ ID NO: 1288 - DNA, 51 bp, Artificial Sequence
  Synthetic polynucleotide
gagggcgaggccaccaaagggtaccyggacgaccccacggtgccccgcggg

SEQ ID NO: 1289 - DNA, 51 bp, Artificial Sequence
  Synthetic polynucleotide
tggagagggcgaggccaccaaagggyacctggacgaccccacggtgccccg

SEQ ID NO: 1290 - DNA, 51 bp, Artificial Sequence
  Synthetic polynucleotide
ggtccacatctcagggacactgtggyggacctatgtcatcagcgtggtgtt

SEQ ID NO: 1291 - DNA, 51 bp, Artificial Sequence
  Synthetic polynucleotide
tcagggacactgtggtggacctatgycatcagcgtggtgttccggctgttg

SEQ ID NO: 1292 - DNA, 51 bp, Artificial Sequence
  Synthetic polynucleotide
tgtgtccgtctggtgtagtaatgatyacctgggcatgagccgacaccctca

SEQ ID NO: 1293 - DNA, 51 bp, Artificial Sequence
  Synthetic polynucleotide
ctggccccacggcctgaagacttcaygcggcccagacgtgttcagcggcag

SEQ ID NO: 1294 - DNA, 51 bp, Artificial Sequence; identical to SEQ ID NO: 1293
  Synthetic polynucleotide

SEQ ID NO: 1295 - DNA, 51 bp, Artificial Sequence
  Synthetic polynucleotide
ggccatcgtgggcattgccttctccyggatctgggctgctgtgtggacagc

SEQ ID NO: 1296 - DNA, 51 bp, Artificial Sequence
  Synthetic polynucleotide
gctgttgtacagtgcctgcttctgghggctgttttgctatgcagtggatgc

SEQ ID NO: 1297 - DNA, 51 bp, Artificial Sequence
  Synthetic polynucleotide
agaatcaccaggcctcatcaccatcygccttttaggatatctactcagtgc

SEQ ID NO: 1298 - DNA, 51 bp, Artificial Sequence
  Synthetic polynucleotide
ttcctcaaatttggatctggctatgyaagtggctggggaagagtcttccac

SEQ ID NO: 1299 - DNA, 51 bp, Artificial Sequence
  Synthetic polynucleotide
agttccacttgttgaccgagccacahgtcttcgatctacaaagttcaccat

SEQ ID NO: 1300 - DNA, 51 bp, Artificial Sequence
  Synthetic polynucleotide
tgtgcaatgaaaggcaaatatggaayatataccaaggtatcccggtatgtc

SEQ ID NO: 1301 - DNA, 51 bp, Artificial Sequence
  Synthetic polynucleotide
taccaaggtatcccggtatgtcaacyggattaaggaaaaaacaaagctcac

SEQ ID NO: 1302 - DNA, 51 bp, Artificial Sequence
  Synthetic polynucleotide
tttaggatatctactcagtgctgaaygtacaggtttgtttccttttttaaa

SEQ ID NO: 1303 - DNA, 51 bp, Artificial Sequence
  Synthetic polynucleotide
ctgaattttggaagcagtatgttggyaagcaattcattttatcctctagct

SEQ ID NO: 1304 - DNA, 51 bp, Artificial Sequence
  Synthetic polynucleotide
attgctgacaaggaatacacgaacaycttcctcaaatttggatctggctat

SEQ ID NO: 1305 - DNA, 51 bp, Artificial Sequence
  Synthetic polynucleotide
cattgatgcccagacctttgctgacyggggagtagatctgctaaaatttga

SEQ ID NO: 1306 - DNA, 51 bp, Artificial Sequence
  Synthetic polynucleotide
ttatttcattctttttctcagttagygattggcaactttggcctcagctgg

SEQ ID NO: 1307 - DNA, 51 bp, Artificial Sequence
  Synthetic polynucleotide
ccaacaaatgccaatctgactctctytgagtgctggagcagttcctctaat

SEQ ID NO: 1308 - DNA, 51 bp, Artificial Sequence
  Synthetic polynucleotide
tatgatgctttgaactccatccaccyctacaccttcgacgtcgcatttgcg

SEQ ID NO: 1309 - DNA, 51 bp, Artificial Sequence
  Synthetic polynucleotide
ttcaaggtgatgaggcttcgcaaacyggctcagcagattgcaaactgcaaa

SEQ ID NO: 1310 - DNA, 51 bp, Artificial Sequence
  Synthetic polynucleotide
cagtatcgggatgccctttacaagtycatggtggatactgccgtgctttta

SEQ ID NO: 1311 - DNA, 51 bp, Artificial Sequence
  Synthetic polynucleotide
ctcataggatttccagcaggagagcyccagaagcctttcttttggggaaca

SEQ ID NO: 1312 - DNA, 51 bp, Artificial Sequence
  Synthetic polynucleotide
agaaagtgaaattcgttattctacayggaagaaagctgtgatgaagtcaat

SEQ ID NO: 1313 - DNA, 51 bp, Artificial Sequence
  Synthetic polynucleotide
aactgctgggcgtccctgctcatgcytgagctggcccaggaccgcttgcag

SEQ ID NO: 1314 - DNA, 51 bp, Artificial Sequence
  Synthetic polynucleotide
cttctgggaggacatccttgttttcytaccacacaagatattcatttgggt

SEQ ID NO: 1315 - DNA, 51 bp, Artificial Sequence
  Synthetic polynucleotide
ctgaagggccgtgaccttctcactcyaaaaaactttaccggagaagaaatt

SEQ ID NO: 1316 - DNA, 51 bp, Artificial Sequence
  Synthetic polynucleotide
ttggcagagcagtatgccaaagaggyatgctctttacatgtaaagctatta

SEQ ID NO: 1317 - DNA, 51 bp, Artificial Sequence
  Synthetic polynucleotide
cctccacctgctgacgttgtgctgcyacctagagttgcgctcggagttgcg

SEQ ID NO: 1318 - DNA, 51 bp, Artificial Sequence
  Synthetic polynucleotide
cattctaaaggcaatttaaaaatcaygtcaagctcagttgaacagaaaaaa

SEQ ID NO: 1319 - DNA, 51 bp, Artificial Sequence
  Synthetic polynucleotide
catcacctatgccctgaccgttgtgyggctcctggtgtttgcctgctctgc

SEQ ID NO: 1320 - DNA, 51 bp, Artificial Sequence
  Synthetic polynucleotide
cctggcaaggtttgtggctccaaccytctgtccatctgcaaaacagctgag

SEQ ID NO: 1321 - DNA, 51 bp, Artificial Sequence
  Synthetic polynucleotide
aacacctggaccacctgccagtctaytgccttccccagcaagacctctgcc

SEQ ID NO: 1322 - DNA, 51 bp, Artificial Sequence
  Synthetic polynucleotide
attttcctgcagttccaaatgacctyccacctgtttattgctgcatttgtg

SEQ ID NO: 1323 - DNA, 51 bp, Artificial Sequence
  Synthetic polynucleotide
ctcccacttcttcagcttgggcaagygtgtgcctgtgtgccgaggtgagct

SEQ ID NO: 1324 - DNA, 51 bp, Artificial Sequence
  Synthetic polynucleotide
cttcgtgaaggataacccccagaagycctacttcatccgcctttacggcct

SEQ ID NO: 1325 - DNA, 51 bp, Artificial Sequence
  Synthetic polynucleotide
aacctcgacccagatctgcggagtcygttctccagggcaggaatcagcgag

SEQ ID NO: 1326 - DNA, 51 bp, Artificial Sequence
  Synthetic polynucleotide
cttacatttcagaaccatcaagaaayggggacctggattttatttgcctgc

SEQ ID NO: 1327 - DNA, 51 bp, Artificial Sequence
  Synthetic polynucleotide
accatgagcaacaacttggtaacccyggaaaatgggaaacagctgaccgtt

SEQ ID NO: 1328 - DNA, 51 bp, Artificial Sequence
  Synthetic polynucleotide
tcctcctactgcatcgacagcatccygggccggaggagcccgtgcaaaatg

SEQ ID NO: 1329 - DNA, 51 bp, Artificial Sequence
  Synthetic polynucleotide
tgatcatttctcctccagatcattcygcaatccatgcataagtacaaaccc

SEQ ID NO: 1330 - DNA, 51 bp, Artificial Sequence
  Synthetic polynucleotide
ggtgaactccagaaagaagaagctayggccgcagtgattctggagagcatc

SEQ ID NO: 1331 - DNA, 51 bp, Artificial Sequence
  Synthetic polynucleotide
aaggacctgaccttcttgaaggagcyggggactggacaatttggggtagtg

SEQ ID NO: 1332 - DNA, 51 bp, Artificial Sequence
  Synthetic polynucleotide
gctgctagagatgtgcaaggatgtcygtgaagccatggaatacctggagtc

SEQ ID NO: 1333 - DNA, 51 bp, Artificial Sequence
  Synthetic polynucleotide
gttgttaaagtatctgatttcggccygtccaggtgagtgtggctttttcat

SEQ ID NO: 1334 - DNA, 51 bp, Artificial Sequence
  Synthetic polynucleotide
caagttcagcagcaaatctgacattygggcttttggtaagtggataagatt

SEQ ID NO: 1335 - DNA, 51 bp, Artificial Sequence
  Synthetic polynucleotide
ttcaaaattcttctgagcaatattcyagatgtcatggatgaagaatcctga

SEQ ID NO: 1336 - DNA, 51 bp, Artificial Sequence
  Synthetic polynucleotide
gatggacaatggattctaaactcttycttggatgccacccttacctcagtg

SEQ ID NO: 1337 - DNA, 51 bp, Artificial Sequence
  Synthetic polynucleotide
gattcatccccaccctctgacagagytcctccacaacatggactacttcaa

SEQ ID NO: 1338 - DNA, 51 bp, Artificial Sequence
  Synthetic polynucleotide
gacactcaatgagatctaccactggytcacacgcatgtttgccttcttcag

SEQ ID NO: 1339 - DNA, 51 bp, Artificial Sequence
  Synthetic polynucleotide
ctgcgccacaacaacctgtccttcaycacgcccggcgccttcaagggcctg

SEQ ID NO: 1340 - DNA, 51 bp, Artificial Sequence
  Synthetic polynucleotide
caccctgcagatacatgtcatggagygcattgagtagggccggccagtgca

SEQ ID NO: 1341 - DNA, 51 bp, Artificial Sequence
  Synthetic polynucleotide
ccatactggcctcagcacctaagacyggacaactttgtacctaatgaccgc

SEQ ID NO: 1342 - DNA, 51 bp, Artificial Sequence
  Synthetic polynucleotide
cttcggactctcaagcaggaaaacahtgtggagttgaaggaagcatttcgt

SEQ ID NO: 1343 - DNA, 51 bp, Artificial Sequence
  Synthetic polynucleotide
gccttaattatttcacatatgaggtytattatgcttcatgacataagacaa

SEQ ID NO: 1344 - DNA, 51 bp, Artificial Sequence
  Synthetic polynucleotide
agttacctttactaagaaggtaaggrtatgccccgcagtgacaaatgccga

SEQ ID NO: 1345 - DNA, 51 bp, Artificial Sequence
  Synthetic polynucleotide
ggatccagctgaaaggatcactgttyatgaagcactgaatcacccatggct

SEQ ID NO: 1346 - DNA, 51 bp, Artificial Sequence
  Synthetic polynucleotide
tgagctcgtgtgcacagccccacagygggtccctgtctcctgggtctatta

SEQ ID NO: 1347 - DNA, 51 bp, Artificial Sequence
  Synthetic polynucleotide
aggggaggacttctactgcgtgactygccatgagaccaagtttgccaagca

SEQ ID NO: 1348 - DNA, 51 bp, Artificial Sequence
  Synthetic polynucleotide
ggaggactcccccaagtgcaaggggygcttcaaggccattgtggcaggtac

SEQ ID NO: 1349 - DNA, 51 bp, Artificial Sequence
  Synthetic polynucleotide
caccgctgtggaggaccagtattacygcgtggattgctacaagaactttgt

SEQ ID NO: 1350 - DNA, 51 bp, Artificial Sequence
  Synthetic polynucleotide
  misc_feature (26)..(26): n is a, c, g, t or u
atacaacacgctgaagaatttcttancaaacctgaatccaaagttgctaag

SEQ ID NO: 1351 - DNA, 51 bp, Artificial Sequence
  Synthetic polynucleotide
cttatttcttgccttaggggaaagcyatgtctgttcctcagacaacttctt

SEQ ID NO: 1352 - DNA, 51 bp, Artificial Sequence
  Synthetic polynucleotide
atcctgttgaacgtgtttcttgccaytgctgtggacaacctggccagtgga

SEQ ID NO: 1353 - DNA, 51 bp, Artificial Sequence
  Synthetic polynucleotide
acagggcagctggtaaagatgctacygtatacagaggtgactcgctacctg

SEQ ID NO: 1354 - DNA, 51 bp, Artificial Sequence
  Synthetic polynucleotide
atcatggcccccattgcatttgagcyggtgggcccaatgcaggcctcacag

SEQ ID NO: 1355 - DNA, 51 bp, Artificial Sequence
  Synthetic polynucleotide
ctccaggtcctttccttcctgctccygggcctgatgtccatgatgattccc

SEQ ID NO: 1356 - DNA, 51 bp, Artificial Sequence
  Synthetic polynucleotide
ccccccatcatcggggctgtaatccycttcttcgtccctctgatgcatcaa

SEQ ID NO: 1357 - DNA, 51 bp, Artificial Sequence
  Synthetic polynucleotide
gaaatgcttactggtacactcccttyccaaggaaaagatcgaaaagaaaca

SEQ ID NO: 1358 - DNA, 51 bp, Artificial Sequence
  Synthetic polynucleotide
aagttttcttcatacagttcttttgygtgacaaactggatttcagcacggc

SEQ ID NO: 1359 - DNA, 51 bp, Artificial Sequence
  Synthetic polynucleotide
gaagtggcttcgaaacattgactatyaccgtttagatggttccactactgc

SEQ ID NO: 1360 - DNA, 51 bp, Artificial Sequence
  Synthetic polynucleotide
gatattaagaaggctcatcttgcatyggaagaagacttaaattccgagttt

SEQ ID NO: 1361 - DNA, 51 bp, Artificial Sequence
  Synthetic polynucleotide
cagtccctcatatctctggacttgaytgaagattttcttgaattagctagt

SEQ ID NO: 1362 - DNA, 51 bp, Artificial Sequence
  Synthetic polynucleotide
aggtggggtgactcggatgactgttyctcttgttgtcataatgtttgaact

SEQ ID NO: 1363 - DNA, 51 bp, Artificial Sequence
  Synthetic polynucleotide
gacacatccctggaccctaatgattbtgacttcacggtaactgggagaggg

SEQ ID NO: 1364 - DNA, 51 bp, Artificial Sequence
  Synthetic polynucleotide
tgcctcggggtgcgtctagggctgcytgaggtcaagttgacactgctccac

SEQ ID NO: 1365 - DNA, 51 bp, Artificial Sequence
  Synthetic polynucleotide
ttttttattcctcccaggtactatcytggtcgtcggatgtttattgttatt

SEQ ID NO: 1366 - DNA, 51 bp, Artificial Sequence
  Synthetic polynucleotide
ttcttcattttaccatgacactgatytcttgggagaagaactggatattgt

SEQ ID NO: 1367 - DNA, 51 bp, Artificial Sequence
  Synthetic polynucleotide
ggtagtctgcacttaccacccaagaygtttactcttcactttcacggcgga

SEQ ID NO: 1368 - DNA, 51 bp, Artificial Sequence
  Synthetic polynucleotide
agccccgacggcgagtggcggcgccygggccggcccgtcttccccacggca

SEQ ID NO: 1369 - DNA, 51 bp, Artificial Sequence
  Synthetic polynucleotide
atcgtggcccccctcctgacctcaayagatgccatctccctggagtgtgag

SEQ ID NO: 1370 - DNA, 51 bp, Artificial Sequence
  Synthetic polynucleotide
ttatgcttatagggaagaacagcttygcattggtcctgcaacaatggatac

SEQ ID NO: 1371 - DNA, 51 bp, Artificial Sequence
  Synthetic polynucleotide
gactacaattgtgtgccatcagtgayttacacacaccctgaagttgcttgg

SEQ ID NO: 1372 - DNA, 51 bp, Artificial Sequence
  Synthetic polynucleotide
gggcaggggacggtggccgcggccaygcagtcctgtgccagggcgtggggg

SEQ ID NO: 1373 - DNA, 51 bp, Artificial Sequence
  Synthetic polynucleotide
agactggctcaacctcgtctttaagyggtaagaaccatatagagaggagat

SEQ ID NO: 1374 - DNA, 51 bp, Artificial Sequence
  Synthetic polynucleotide
ccgagagtcctggtgactttgaacaygctggtgccgctagccaagctgtcc

SEQ ID NO: 1375 - DNA, 51 bp, Artificial Sequence
  Synthetic polynucleotide
ctggcccgagagctccttaaagagcygcgaactcaagtctagaaggcacgc

SEQ ID NO: 1376 - DNA, 51 bp, Artificial Sequence
  Synthetic polynucleotide
gccctcaggctcctctgccttctgcytgggcttcagggctgcctggctgca

SEQ ID NO: 1377 - DNA, 51 bp, Artificial Sequence
  Synthetic polynucleotide
cccctctgcctgcccgaacggacgtyctctgagaggacgctggccttcgtg

SEQ ID NO: 1378 - DNA, 51 bp, Artificial Sequence
  Synthetic polynucleotide
acaacccgtcctgtcctggggctgcyggtctgcttcctgtacaacgaggcg

SEQ ID NO: 1379 - DNA, 51 bp, Artificial Sequence
  Synthetic polynucleotide
tgcgcggacgagctgggctgcttcgygggcacggctgaggcgctgcgctgc

SEQ ID NO: 1380 - DNA, 51 bp, Artificial Sequence
  Synthetic polynucleotide
cctactggccttctcctccgcgtgcyacttccagaactgcccgaggggcgg

SEQ ID NO: 1381 - DNA, 51 bp, Artificial Sequence
  Synthetic polynucleotide
gggactcagaggagcgggcaggtgcytgaggtggctggcaccaaggcgatt

SEQ ID NO: 1382 - DNA, 51 bp, Artificial Sequence
  Synthetic polynucleotide
gggcggtgcgcgcatggccgagaccbgcgtgccagtcctgcgctgcaacac

SEQ ID NO: 1383 - DNA, 51 bp, Artificial Sequence
  Synthetic polynucleotide
tagccactgccacgccctggccacaygtgtcaatgtggtgggcagctactt

SEQ ID NO: 1384 - DNA, 51 bp, Artificial Sequence
  Synthetic polynucleotide
caaatcgaataatggcagatggcacygccagtgcaaacaggacttcaacat

SEQ ID NO: 1385 - DNA, 51 bp, Artificial Sequence
  Synthetic polynucleotide
aatcagaactcgaatggccttgtttycttgctctggggctcttatgctcag

SEQ ID NO: 1386 - DNA, 51 bp, Artificial Sequence
  Synthetic polynucleotide
caggtgtaccgccagcgcaggaagcygattgctgagatcgccttccagtac

SEQ ID NO: 1387 - DNA, 51 bp, Artificial Sequence
  Synthetic polynucleotide
ccaccctcaaaataattcgatttgcygtaccaagtgccacaaaggtagggg

SEQ ID NO: 1388 - DNA, 51 bp, Artificial Sequence
  Synthetic polynucleotide
aatgggtcaggtggagatctcttctygcacagtggaccgggacaccgtgtg

SEQ ID NO: 1389 - DNA, 51 bp, Artificial Sequence
  Synthetic polynucleotide
ggcggcatgaaccggaggcccatccycaccatcatcacactggaagactcc

SEQ ID NO: 1390 - DNA, 51 bp, Artificial Sequence
  Synthetic polynucleotide
cagtactcccctgccctcaacaagaygttttgccaactggccaagacctgc

SEQ ID NO: 1391 - DNA, 51 bp, Artificial Sequence
  Synthetic polynucleotide
gagcgcttcgagatgttccgagagcygaatgaggccttggaactcaaggat

SEQ ID NO: 1392 - DNA, 51 bp, Artificial Sequence
  Synthetic polynucleotide
tctctgaacagacgcatccagctggytgaggaagagttggatcgtgcccag

SEQ ID NO: 1393 - DNA, 51 bp, Artificial Sequence
  Synthetic polynucleotide
gggtggtgcttccctcaagcccgaaytcgtggacatcatcaatgccaaaca

SEQ ID NO: 1394 - DNA, 51 bp, Artificial Sequence
  Synthetic polynucleotide
aagcatgagaacatactccagttccygacggctgaggagcggaagacggag

SEQ ID NO: 1395 - DNA, 51 bp, Artificial Sequence
  Synthetic polynucleotide
ctttcgccttagcgcccactgctccygtgacagcagggataacacactgca

SEQ ID NO: 1396 - DNA, 51 bp, Artificial Sequence
  Synthetic polynucleotide
gctgcccgaggccgtgctcgccctgyacaacagcacccgcgaccgggtggc

SEQ ID NO: 1397 - DNA, 51 bp, Artificial Sequence
  Synthetic polynucleotide
  misc_feature (26)..(26): n is a, c, g, t or u
tgagggctttcgccttagcgcccacngctcctgtgacagcagggataacac

SEQ ID NO: 1398 - DNA, 51 bp, Artificial Sequence
  Synthetic polynucleotide
atcatcctcctcaaaggctgctgcayggagatcatgtcccttcgcgctgct

SEQ ID NO: 1399 - DNA, 51 bp, Artificial Sequence
  Synthetic polynucleotide
ccgcttcctgcacatgaaggtggaaygccccacagaactcttccccccttt

SEQ ID NO: 1400 - DNA, 51 bp, Artificial Sequence
  Synthetic polynucleotide
ctcttcccccctttgttcttggaagygttcgaggattagactgactggatt

SEQ ID NO: 1401 - DNA, 51 bp, Artificial Sequence
  Synthetic polynucleotide
gaagcacaagctgggcgggggccagyacggggaggtgtacgagggcgtgtg

SEQ ID NO: 1402 - DNA, 51 bp, Artificial Sequence
  Synthetic polynucleotide
aggggtctgcacccgggagcccccgytctatatcatcactgagttcatgac

SEQ ID NO: 1403 - DNA, 51 bp, Artificial Sequence
  Synthetic polynucleotide
atggccactcagatctcgtcagccayggagtacctggagaagaaaaacttc

SEQ ID NO: 1404 - DNA, 51 bp, Artificial Sequence
  Synthetic polynucleotide
tgaacacggagcacaacatcatattyacaggcttgtaaaggactgaacatg

SEQ ID NO: 1405 - DNA, 51 bp, Artificial Sequence
  Synthetic polynucleotide
tggatacccatccccgacagtgacahggtacagggaagactaccaaatcga

SEQ ID NO: 1406 - DNA, 51 bp, Artificial Sequence
  Synthetic polynucleotide
gaaaacacagatgacctgacaacccygatcatcatggacgtacagaaacaa

SEQ ID NO: 1407 - DNA, 51 bp, Artificial Sequence
  Synthetic polynucleotide
ccccacaggctctgccatgcagcagygccaattgctgtgccgccagggctc

SEQ ID NO: 1408 - DNA, 51 bp, Artificial Sequence
  Synthetic polynucleotide
tctctctcccacaggcccgacaaccygcgagaaatctcgaaccagtgggct

SEQ ID NO: 1409 - DNA, 51 bp, Artificial Sequence
  Synthetic polynucleotide
cgggtgctggcggcaggcaaaggggyaaggctgtggagtccagtcagagga

SEQ ID NO: 1410 - DNA, 51 bp, Artificial Sequence
  Synthetic polynucleotide
gccttatttgaagaagaaggatgaayctcaggaaggcaagcagcagtatct

SEQ ID NO: 1411 - DNA, 51 bp, Artificial Sequence
  Synthetic polynucleotide
ccgttcatcgacgaggctaagcggcygcgagcgctgcacatgaaggagcac

SEQ ID NO: 1412 - DNA, 51 bp, Artificial Sequence
  Synthetic polynucleotide
taatgtcaccaactttacctccagcyggaaggatggcttggcctttaatgc

SEQ ID NO: 1413 - DNA, 51 bp, Artificial Sequence
  Synthetic polynucleotide
ggtgtgccagttctcgagggatgccyctgtggctgaggcgtggctgattgc

SEQ ID NO: 1414 - DNA, 51 bp, Artificial Sequence
  Synthetic polynucleotide
ttggctctccagagacagaaagctcbgtccaatgctgcaaacttacaacga

SEQ ID NO: 1415 - DNA, 51 bp, Artificial Sequence
  Synthetic polynucleotide
ggctctccagagacagaaagctctgyccaatgctgcaaacttacaacgatt

SEQ ID NO: 1416 - DNA, 51 bp, Artificial Sequence
  Synthetic polynucleotide
aaatttgaagacttccaagtggagcyggtagctaaagaagggagagttgtt

SEQ ID NO: 1417 - DNA, 51 bp, Artificial Sequence
  Synthetic polynucleotide
cgagattcagaagaatattgatggtygggagggaaaagacattggacagtg

SEQ ID NO: 1418 - DNA, 51 bp, Artificial Sequence
  Synthetic polynucleotide
tgtggaagaaggcagaggaaaacaayggtggaacctgagaaggacgtgttt

SEQ ID NO: 1419 - DNA, 51 bp, Artificial Sequence
  Synthetic polynucleotide
tttgggtatctctctttgcttcaagytgtaagtgaacactattttctctga

SEQ ID NO: 1420 - DNA, 51 bp, Artificial Sequence
  Synthetic polynucleotide
actattttgacaaactgtgtgtttahgacaatgagtaaccctcctgattgg

SEQ ID NO: 1421 - DNA, 51 bp, Artificial Sequence
  Synthetic polynucleotide
tctatactttggaggtcaagacatcyttatgacagaagaacagaagaaata

SEQ ID NO: 1422 - DNA, 51 bp, Artificial Sequence
  Synthetic polynucleotide
gggctggaggtgggcaagacgcccahcgccatcgagattgagcacttcatc

SEQ ID NO: 1423 - DNA, 51 bp, Artificial Sequence
  Synthetic polynucleotide
cagcaatatcccggagatcacgcccytcctgctgttcatcatggccaacat

SEQ ID NO: 1424 - DNA, 51 bp, Artificial Sequence
  Synthetic polynucleotide
cctcagaatctccccacaggccgccygatctttgacaacttgaagaaatcc

SEQ ID NO: 1425 - DNA, 51 bp, Artificial Sequence
  Synthetic polynucleotide
acggctactgggaatccgcctcgacygggatgaccggaccatgaatgatct

SEQ ID NO: 1426 - DNA, 51 bp, Artificial Sequence
  Synthetic polynucleotide
aagaaggctgacattggcattgccaygggcatctctggctctgacgtctct

SEQ ID NO: 1427 - DNA, 51 bp, Artificial Sequence
  Synthetic polynucleotide
gggcggacacccatagcaatggagaytgaacacttcatccagctgatcaca

SEQ ID NO: 1428 - DNA, 51 bp, Artificial Sequence
  Synthetic polynucleotide
atgtttatggtttattttaggggccytgatgctctcagcaagaaagcgaag

SEQ ID NO: 1429 - DNA, 51 bp, Artificial Sequence
  Synthetic polynucleotide
gtgggtgtccgggctggcggaggcaytggggacgagatcgaggaccccgcg

SEQ ID NO: 1430 - DNA, 51 bp, Artificial Sequence
  Synthetic polynucleotide
gttctccatgctggccgcctacatgyttctgctgatcgtgctgggcttccc

SEQ ID NO: 1431 - DNA, 51 bp, Artificial Sequence
  Synthetic polynucleotide
ctctttcactgttttataaaaaaggytagtagatgattattttcaagagca

SEQ ID NO: 1432 - DNA, 51 bp, Artificial Sequence
  Synthetic polynucleotide
tatgatgtgttccatgtatggcataygcaaagtgaagaatatagaccttaa

SEQ ID NO: 1433 - DNA, 51 bp, Artificial Sequence
  Synthetic polynucleotide
agatttgagtttgtttataattactyatatttagccaatttacgtgagaac

SEQ ID NO: 1434 - DNA, 51 bp, Artificial Sequence
  Synthetic polynucleotide
attcagtggatcagcaatcgctaccyggacttttcctccaaagaagtcaaa

SEQ ID NO: 1435 - DNA, 51 bp, Artificial Sequence
  Synthetic polynucleotide
caacccggactacacttggcaagcayggcgctactgaaagtcaagtttgac

SEQ ID NO: 1436 - DNA, 51 bp, Artificial Sequence
  Synthetic polynucleotide
actgagggtcccagccctggagactyccgctactcagatgggacccctgta

SEQ ID NO: 1437 - DNA, 51 bp, Artificial Sequence
  Synthetic polynucleotide
tttccccaggttctggagatgagcahtggggcgccggaagcccagcaacgc

SEQ ID NO: 1438 - DNA, 51 bp, Artificial Sequence
  Synthetic polynucleotide
agcaccctgtgtggcgaggtgccgcyctactacatctaggacgcctccggt

SEQ ID NO: 1439 - DNA, 51 bp, Artificial Sequence
  Synthetic polynucleotide
ctcactgacatgccagacatattacytgaacttggacaatttaaaaaaacc

SEQ ID NO: 1440 - DNA, 51 bp, Artificial Sequence
  Synthetic polynucleotide
ccccaccttctgcgaccactgtggcyccctcctctacgggcttgtgcacca

SEQ ID NO: 1441 - DNA, 51 bp, Artificial Sequence
  Synthetic polynucleotide
acagtgtggccgcagcggcgagaacyttgacaagttcttcacgcgggcggc

SEQ ID NO: 1442 - DNA, 51 bp, Artificial Sequence
  Synthetic polynucleotide
tgtaacttttgaggacgctggggaayatacgtgcttggcgggtaattctat

SEQ ID NO: 1443 - DNA, 51 bp, Artificial Sequence
  Synthetic polynucleotide
ttttgaggacgctggggaatatacghgcttggcgggtaattctattgggat

SEQ ID NO: 1444 - DNA, 51 bp, Artificial Sequence
  Synthetic polynucleotide
cagtgatgcccagccccacatccagbggatcaagcacgtggaaaagaacgg

SEQ ID NO: 1445 - DNA, 51 bp, Artificial Sequence
  Synthetic polynucleotide
ccaagccggactgccggcaaatgccyccacagtggtcggaggagacgtaga

SEQ ID NO: 1446 - DNA, 51 bp, Artificial Sequence
  Synthetic polynucleotide
cctgctgcccctcccaggcaggtgaygcttttccggaagagtccccaggag

SEQ ID NO: 1447 - DNA, 51 bp, Artificial Sequence
  Synthetic polynucleotide
ttcattattttaaatagataatgtabccagtgctgagggttggcatgtaaa

SEQ ID NO: 1448 - DNA, 51 bp, Artificial Sequence
  Synthetic polynucleotide
  misc_feature (26)..(26): n is a, c, g, t or u
tgaccgtggtctctttttcttctagntgatcataccagggttgtcctacac

SEQ ID NO: 1449 - DNA, 51 bp, Artificial Sequence
  Synthetic polynucleotide
cagcagcgaaagcgccttgaggcctytcttacccagaagcagaaggtggga

SEQ ID NO: 1450 - DNA, 51 bp, Artificial Sequence
  Synthetic polynucleotide
gcttttgacaaaatgtgctcgaagcygccgaagtccctgtcggaagagtgc

SEQ ID NO: 1451 - DNA, 51 bp, Artificial Sequence
  Synthetic polynucleotide
tacctagtgtgcggggaacgaggctbcttctacacacccaagacccgccgg

SEQ ID NO: 1452 - DNA, 51 bp, Artificial Sequence
  Synthetic polynucleotide
accacaaccaccaagggggagaactycaccgagaccgacgttaagatgatg

SEQ ID NO: 1453 - DNA, 51 bp, Artificial Sequence
  Synthetic polynucleotide
ggcagtcctgccatcaatgtggccgbgcatgtgttcagaaaggctgctgat

SEQ ID NO: 1454 - DNA, 51 bp, Artificial Sequence
  Synthetic polynucleotide
aggaaaaccagtgagtctggagagcygcatgggctcacaactgaggaggaa

SEQ ID NO: 1455 - DNA, 51 bp, Artificial Sequence
  Synthetic polynucleotide
cacccagggcaccggtgaatccaagygtcctctgatggtcaaagttctaga

SEQ ID NO: 1456 - DNA, 51 bp, Artificial Sequence
  Synthetic polynucleotide
gaatttgtagaagggatatacaaagyggaaatagacaccaaatcttactgg

SEQ ID NO: 1457 - DNA, 51 bp, Artificial Sequence
  Synthetic polynucleotide
caccattgccgccctgctgagccccyactcctattccaccacggctgtcgt

SEQ ID NO: 1458 - DNA, 51 bp, Artificial Sequence
  Synthetic polynucleotide
gcatgggctcacaactgaggaggaayttgtagaagggatatacaaagtgga

SEQ ID NO: 1459 - DNA, 51 bp, Artificial Sequence
  Synthetic polynucleotide
tgccatcaatgtggccgtgcatgtghtcagaaaggctgctgatgacacctg

SEQ ID NO: 1460 - DNA, 51 bp, Artificial Sequence
  Synthetic polynucleotide
ggcaccggtgaatccaagtgtcctcygatggtcaaagttctagatgctgtc

SEQ ID NO: 1461 - DNA, 51 bp, Artificial Sequence
  Synthetic polynucleotide
gctgctgatgacacctgggagccatytgcctctgggtaagttgccaaagaa

SEQ ID NO: 1462 - DNA, 51 bp, Artificial Sequence
  Synthetic polynucleotide
tgaggaggaatttgtagaagggatayacaaagtggaaatagacaccaaatc

SEQ ID NO: 1463 - DNA, 51 bp, Artificial Sequence
  Synthetic polynucleotide
attgccctgcccgtacctgtcattgygtccaatttcaactatttctaccac

SEQ ID NO: 1464 - DNA, 51 bp, Artificial Sequence
  Synthetic polynucleotide
cttcagtccgtgcccccgggagcctbtgaccacctgccccagctgcagacc

SEQ ID NO: 1465 - DNA, 51 bp, Artificial Sequence
  Synthetic polynucleotide
gccctgccggcccgcacccgccaccytctgctggccaacaacagccttcag

SEQ ID NO: 1466 - DNA, 51 bp, Artificial Sequence
  Synthetic polynucleotide
ggccaccaaggactgccccagcccaygtacctgccgcgccctggaaaccat

SEQ ID NO: 1467 - DNA, 51 bp, Artificial Sequence
  Synthetic polynucleotide
tgtcccatgcctgcctggggagcccygttcctgctctgggccacagcagag

SEQ ID NO: 1468 - DNA, 51 bp, Artificial Sequence
  Synthetic polynucleotide
cgatttttaaacagatgcagcctcabttccaccttttgttgagaaaagcca

SEQ ID NO: 1469 - DNA, 51 bp, Artificial Sequence
  Synthetic polynucleotide
caacccactgtataaagaggccacgyctaccttcaccaatatcacgtaccg

SEQ ID NO: 1470 - DNA, 51 bp, Artificial Sequence
  Synthetic polynucleotide
gctcctgtcttacaggccctgcctcygggctcacctcgctgtgacctgaag

SEQ ID NO: 1471 - DNA, 51 bp, Artificial Sequence
  Synthetic polynucleotide
aggggggtgtgtggcccacccacatycctggccctggcaagtcagtcttag

SEQ ID NO: 1472 - DNA, 51 bp, Artificial Sequence
  Synthetic polynucleotide
caaactgaaagcaatattatccaaayggctggaggaagctgagcaagtagg

SEQ ID NO: 1473 - DNA, 51 bp, Artificial Sequence
  Synthetic polynucleotide
accaaccctgtcagatatgaccatghatgagatgaatttctctctccttgt

SEQ ID NO: 1474 - DNA, 51 bp, Artificial Sequence
  Synthetic polynucleotide
ctccctcctaggacacggcgagccaygggcggggcagtgcctttcaaagct

SEQ ID NO: 1475 - DNA, 51 bp, Artificial Sequence
  Synthetic polynucleotide
ctgggaaagcagctggctaagaaaabagagcctgagcttgatggcagtgct

SEQ ID NO: 1476 - DNA, 51 bp, Artificial Sequence
  Synthetic polynucleotide
tttgggtgtgagacacacgccatgcygccctatgaccagtacctgcaccgc

SEQ ID NO: 1477 - DNA, 51 bp, Artificial Sequence
  Synthetic polynucleotide
acgagagaatgtctccatggtggacyatggtgagacctccaggacccaggg

SEQ ID NO: 1478 - DNA, 51 bp, Artificial Sequence
  Synthetic polynucleotide
gatcctgcggaagaaccccaaaggcytcttcttgctggtggaaggtaggga

SEQ ID NO: 1479 - DNA, 51 bp, Artificial Sequence
  Synthetic polynucleotide
ggagttcaatgatgttcacttttctyacccttctcgagctaacgtcaaggt

SEQ ID NO: 1480 - DNA, 51 bp, Artificial Sequence
  Synthetic polynucleotide
caagatttacggcgacgattcttccytcaccatctgatcgcagaaatccac

SEQ ID NO: 1481 - DNA, 51 bp, Artificial Sequence
  Synthetic polynucleotide
agagctgtgtctgaacatcagctccyccatgacaaggggaagtccatccaa

SEQ ID NO: 1482 - DNA, 51 bp, Artificial Sequence
  Synthetic polynucleotide
agttatgattgtcatgttggcaattygttttcttacaaaatcggatgggaa

SEQ ID NO: 1483 - DNA, 51 bp, Artificial Sequence
  Synthetic polynucleotide
gttggcaatttgttttcttacaaaaycggatgggaaatctgttaagtaagt

SEQ ID NO: 1484 - DNA, 51 bp, Artificial Sequence
  Synthetic polynucleotide
acctctggacgcagaacttcagccaygaaggtaacaggcatctttcttctc

SEQ ID NO: 1485 - DNA, 51 bp, Artificial Sequence
  Synthetic polynucleotide
atctttcttctcagtgccttggcccbgttgagtctatctggtaagtgttgc

SEQ ID NO: 1486 - DNA, 51 bp, Artificial Sequence
  Synthetic polynucleotide
ggagtgttcgtgaacgggaggccgcygcccaacgccatccggcttcgcatc

SEQ ID NO: 1487 - DNA, 51 bp, Artificial Sequence
  Synthetic polynucleotide
ttaatcaaaggaacaatatgaattahactgtgagatgggctccacattcca

SEQ ID NO: 1488 - DNA, 51 bp, Artificial Sequence
  Synthetic polynucleotide
cagcgccgagagactgtggtacgtgyctgtgaacggcaagggccggccccg

SEQ ID NO: 1489 - DNA, 51 bp, Artificial Sequence
  Synthetic polynucleotide
gatgccacgatgggcctaatctggcygctactgctcagcctgctggagccc

SEQ ID NO: 1490 - DNA, 51 bp, Artificial Sequence
  Synthetic polynucleotide
  misc_feature (26)..(26): n is a, c, g, t or u
cccatgtatgaagtacagtggaaggntgttgaggagataaatggaaacaat

SEQ ID NO: 1491 - DNA, 51 bp, Artificial Sequence
  Synthetic polynucleotide
catctacgagttcatcatgaagaacytcccttactaccgcgagaacaagca

SEQ ID NO: 1492 - DNA, 51 bp, Artificial Sequence
  Synthetic polynucleotide
caatttctgaccgagggaatcatcaygaaagattttagtcatcccaatgtc

SEQ ID NO: 1493 - DNA, 51 bp, Artificial Sequence
  Synthetic polynucleotide
  misc_feature (26)..(26): n is a, c, g, t or u
cttccctgaggaggagaagtgcttcngcgagcccgaagacatccagggtga

SEQ ID NO: 1494 - DNA, 51 bp, Artificial Sequence
  Synthetic polynucleotide
  misc_feature (26)..(26): n is a, c, g, t or u
cacagatccactgtgcgacgagctgngccgcacggtgatcgcagccgctgt

SEQ ID NO: 1495 - DNA, 51 bp, Artificial Sequence
  Synthetic polynucleotide
tagggtcggattccagttaaatggayggcaattgaatccctttttgatcat

SEQ ID NO: 1496 - DNA, 51 bp, Artificial Sequence
  Synthetic polynucleotide
  misc_feature (26)..(26): n is a, c, g, t or u
caactgcttccctgaggaggagaagngcttctgcgagcccgaagacatcca

SEQ ID NO: 1497 - DNA, 51 bp, Artificial Sequence
  Synthetic polynucleotide
  misc_feature (26)..(26): n is a, c, g, t or u
ggggattaaagctggctatggcaccngcaactgcttccctgaggaggagaa

SEQ ID NO: 1498 - DNA, 51 bp, Artificial Sequence
  Synthetic polynucleotide
atgcatgacttctttgtgggacttaygggcaagaggagcgtccagccaggt

SEQ ID NO: 1499 - DNA, 51 bp, Artificial Sequence
  Synthetic polynucleotide
atccgcacgcaggagaaggcgcagcyccaggacctcaatgaccgcttcgcc

SEQ ID NO: 1500 - DNA, 51 bp, Artificial Sequence
  Synthetic polynucleotide
tgcgggcgcgacgaggcgctgcggcygaagcagaggcgccgcacgctgaag

SEQ ID NO: 1501 - DNA, 51 bp, Artificial Sequence
  Synthetic polynucleotide
agccgggggcgccaactccaacgtgytctccatgttcgaacagacccaaat

SEQ ID NO: 1502 - DNA, 51 bp, Artificial Sequence
  Synthetic polynucleotide
ttcacttcagaggagaaaaactccaygtataagctgacaggcgccatcatg

SEQ ID NO: 1503 - DNA, 51 bp, Artificial Sequence
  Synthetic polynucleotide
gcttcctcagcccatgggcatcatgyccatcctggaagaggagtgcatgtt

SEQ ID NO: 1504 - DNA, 51 bp, Artificial Sequence
  Synthetic polynucleotide
aacatggaacagaccattaaggaccygcagcaccggctggacgaagccgag

SEQ ID NO: 1505 - DNA, 51 bp, Artificial Sequence
  Synthetic polynucleotide
gaggtggaacataagaagaagaagcyggaggcgcaggtgcaggagctgcag

SEQ ID NO: 1506 - DNA, 51 bp, Artificial Sequence
  Synthetic polynucleotide
tgtgacgtcaaaaaccctccagacayagtgggcaagacctctcaggtcacg

SEQ ID NO: 1507 - DNA, 51 bp, Artificial Sequence
  Synthetic polynucleotide
cgctggaaggatggctccattgtcayacacaacctagactacagtgacaat

SEQ ID NO: 1508 - DNA, 51 bp, Artificial Sequence
  Synthetic polynucleotide
agtccaagtgtggctcaaaggataayatcaaacacgtcccgggaggcggca

SEQ ID NO: 1509 - DNA, 51 bp, Artificial Sequence
  Synthetic polynucleotide
gaacaagggaaccatcttaaaagcayccgtggactatatccgaaagttgca

SEQ ID NO: 1510 - DNA, 51 bp, Artificial Sequence
  Synthetic polynucleotide
aatgcaggctcgagctcatggacttycccttattccatccacgggtctctg

SEQ ID NO: 1511 - DNA, 51 bp, Artificial Sequence
  Synthetic polynucleotide
accaagaatgagtccggcatcattcytttgggaagtggagggacaccagca

SEQ ID NO: 1512 - DNA, 51 bp, Artificial Sequence
  Synthetic polynucleotide
acaaccctctgtacctggaggatcaygtcagccatgccaatgcaatgacaa

SEQ ID NO: 1513 - DNA, 51 bp, Artificial Sequence
  Synthetic polynucleotide
cccgatgccaaccacaagccagagayggccattgccctcacccccttccag

SEQ ID NO: 1514 - DNA, 51 bp, Artificial Sequence
  Synthetic polynucleotide
ggagacagaagcactgattatgggayatttcagatcaatagccgctactgg

SEQ ID NO: 1515 - DNA, 51 bp, Artificial Sequence
  Synthetic polynucleotide
gatatttcagatcaatagccgctachggtgtaatgatggcaaaaccccagg

SEQ ID NO: 1516 - DNA, 51 bp, Artificial Sequence
  Synthetic polynucleotide
caatgtggtggccttcttcataattygtgcttgctacattaaaatttattt

SEQ ID NO: 1517 - DNA, 51 bp, Artificial Sequence
  Synthetic polynucleotide
aaacttacagtgcctcgttttctcaygtgcaatctctcctttgcagacttt

SEQ ID NO: 1518 - DNA, 51 bp, Artificial Sequence
  Synthetic polynucleotide
tcctgtccctaatcacaggagcatcygtaacacaggcatcagaaagtttcc

SEQ ID NO: 1519 - DNA, 51 bp, Artificial Sequence
  Synthetic polynucleotide
gacttccttagggtcctgatttggcygattaatattctagccatcatggga

SEQ ID NO: 1520 - DNA, 51 bp, Artificial Sequence
  Synthetic polynucleotide
tcttctctaattgctatgttgccccytgtcggtgtcagcaattacatgaag

SEQ ID NO: 1521 - DNA, 51 bp, Artificial Sequence
  Synthetic polynucleotide
tgcgggaacagcctgcgtacggctcycatcaactccactggggaagtaagt

SEQ ID NO: 1522 - DNA, 51 bp, Artificial Sequence
  Synthetic polynucleotide
gagatccacgcctaccgcaagctctyggagggcgaggaggagaggtgggct

SEQ ID NO: 1523 - DNA, 51 bp, Artificial Sequence
  Synthetic polynucleotide
caaacacaacacacgtggcctcaacygcgagcagtgtcaggatttctatcg

SEQ ID NO: 1524 - DNA, 51 bp, Artificial Sequence
  Synthetic polynucleotide
aaatccataaggttaagttggacctrcagagggaagggaaagagaagcgct

SEQ ID NO: 1525 - DNA, 51 bp, Artificial Sequence
  Synthetic polynucleotide
ctgaatgaccgcctggcttcctactyggacaaagttcgggctctggaagaa

SEQ ID NO: 1526 - DNA, 51 bp, Artificial Sequence
  Synthetic polynucleotide
ctctctggaaatgaaaaagtaaccabgcagaatctgaatgaccgcctggct

SEQ ID NO: 1527 - DNA, 51 bp, Artificial Sequence
  Synthetic polynucleotide
ctggctggaggtgagaaggccaccahgcagaacctcaatgaccgcctggcc

SEQ ID NO: 1528 - DNA, 51 bp, Artificial Sequence
  Synthetic polynucleotide
accatgcagaacctcaatgaccgcchggcctcctacctggacaaggtgcgt

SEQ ID NO: 1529 - DNA, 51 bp, Artificial Sequence
  Synthetic polynucleotide
ctcaatgaccgcctggcctcctaccyggacaaggtgcgtgccctggaggag

SEQ ID NO: 1530 - DNA, 51 bp, Artificial Sequence
  Synthetic polynucleotide
ctcaatgaccgcctggcctcctaccyggacaaggtgcgtgctctggaggag

SEQ ID NO: 1531 - DNA, 51 bp, Artificial Sequence
  Synthetic polynucleotide
ctggtgggcagtgagaaggtgaccahgcagaacctcaatgaccgcctggcc

SEQ ID NO: 1532 - DNA, 51 bp, Artificial Sequence
  Synthetic polynucleotide
atgattggcagcgtggaggagcagcyggcccagctccgctgcgagatggag

SEQ ID NO: 1533 - DNA, 51 bp, Artificial Sequence
  Synthetic polynucleotide
ctggtgggcagtgagaaggtgaccaygcagaacctcaatgaccgcctggcc

SEQ ID NO: 1534 - DNA, 51 bp, Artificial Sequence
  Synthetic polynucleotide
gcggctggagcaggagatcgccaccyaccgccgcctgctggagggcgagga

SEQ ID NO: 1535 - DNA, 51 bp, Artificial Sequence
  Synthetic polynucleotide
ctcaacgaccgcctggcttcctaccyggagaaggtgcgcgccctggaggag

SEQ ID NO: 1536 - DNA, 51 bp, Artificial Sequence
  Synthetic polynucleotide
ctttcgcggtggcctgggcggcggchatggtggggccagcggcatgggagg

SEQ ID NO: 1537 - DNA, 51 bp, Artificial Sequence
  Synthetic polynucleotide
gagctcatgaacaccaagctggcccyggacgtggagatcgccacttaccgc

SEQ ID NO: 1538 - DNA, 51 bp, Artificial Sequence
  Synthetic polynucleotide
tctgacacctcagtggtcctctccahggacaacaaccgcaacctggacctg

SEQ ID NO: 1539 - DNA, 51 bp, Artificial Sequence
  Synthetic polynucleotide
gccaccatgtctcgccagtcaagtgygtccttccggagcgggggcagtcgt

SEQ ID NO: 1540 - DNA, 51 bp, Artificial Sequence
  Synthetic polynucleotide
caagaccctcaacaataagtttgccyccttcatcgacaaggtgagctacga

SEQ ID NO: 1541 - DNA, 51 bp, Artificial Sequence
  Synthetic polynucleotide
tgcgtggcctgccgcaacttctaccyggacggcaggtgtgtggagacctgc

SEQ ID NO: 1542 - DNA, 51 bp, Artificial Sequence
  Synthetic polynucleotide
ttgcatgagctggagaattgctctgycatcgaaggacacttgcagatactc

SEQ ID NO: 1543 - DNA, 51 bp, Artificial Sequence
  Synthetic polynucleotide
catcactcggatgcgcatgagacccyggctagagatgcagattaattccaa

SEQ ID NO: 1544 - DNA, 51 bp, Artificial Sequence
  Synthetic polynucleotide
aacctcaagaagatggggcagaaccygggtacggcagggccagagtggagg

SEQ ID NO: 1545 - DNA, 51 bp, Artificial Sequence
  Synthetic polynucleotide
ccgaggacgctgctccatgggccagygtgtgtgtgagcctggttggacagg

SEQ ID NO: 1546 - DNA, 51 bp, Artificial Sequence
  Synthetic polynucleotide
ctgcaagaaggccccagtgaagagcygcacggagtgtgtccgtgtggataa

SEQ ID NO: 1547 - DNA, 51 bp, Artificial Sequence
  Synthetic polynucleotide
atctcactctcaggagaccattgcaycattggccgcacactggtggtaagt

SEQ ID NO: 1548 - DNA, 51 bp, Artificial Sequence
  Synthetic polynucleotide
aagacaggaaacgctggaagtcgttyggcttgtggtgtaattgggatcgcc

SEQ ID NO: 1549 - DNA, 51 bp, Artificial Sequence
  Synthetic polynucleotide
cgtttggcttgtggtgtaattgggaycgcccaataaacattcccttggatg

SEQ ID NO: 1550 - DNA, 51 bp, Artificial Sequence
  Synthetic polynucleotide
accagactttctttttgtaggtttcyctacagtgagttaatgaaatacaac

SEQ ID NO: 1551 - DNA, 51 bp, Artificial Sequence
  Synthetic polynucleotide
tccaaaaagaacatttttcttctatytaagaagctctgctccttccgttac

SEQ ID NO: 1552 - DNA, 51 bp, Artificial Sequence
  Synthetic polynucleotide
ccatatttcaaattccagattggtgrtgttgacatctgggtcctcaaaagc

SEQ ID NO: 1553 - DNA, 51 bp, Artificial Sequence
  Synthetic polynucleotide
actgcaacagagaatggtgacttctyggccctggatcttggaggaaccaat

SEQ ID NO: 1554 - DNA, 51 bp, Artificial Sequence
  Synthetic polynucleotide
cttccccacactatctcaatgcaaayatctgtctgaaacggtccctggcta

SEQ ID NO: 1555 - DNA, 51 bp, Artificial Sequence
  Synthetic polynucleotide
gttgtctacccatggacccagaggtyctttgacagctttggcaacctgtcc

SEQ ID NO: 1556 - DNA, 51 bp, Artificial Sequence
  Synthetic polynucleotide
tagcagtatcctcttgggggcccctyccccacactatctcaatgcaaatat

SEQ ID NO: 1557 - DNA, 51 bp, Artificial Sequence
  Synthetic polynucleotide
tctcacaaactaatgaaaccctgctyatcttaaaccaacctgctcactgga

SEQ ID NO: 1558 - DNA, 51 bp, Artificial Sequence
  Synthetic polynucleotide
cacctggacaacctcaagggcacctytgccacactgagtgagctgcactgt

SEQ ID NO: 1559 - DNA, 51 bp, Artificial Sequence
  Synthetic polynucleotide
gtctacccttggacccagaggttctbtgagtcctttggggatctgtccact

SEQ ID NO: 1560 - DNA, 51 bp, Artificial Sequence
  Synthetic polynucleotide
acagctcctgggcaacgtgctggtcygtgtgctggcccatcactttggcaa

SEQ ID NO: 1561 - DNA, 51 bp, Artificial Sequence
  Synthetic polynucleotide
ggtctacccttggacccagaggttcbttgagtcctttggggatctgtccac

SEQ ID NO: 1562 - DNA, 51 bp, Artificial Sequence
  Synthetic polynucleotide
ctcccacagctcctgggcaacgtgcyggtctgtgtgctggcccatcacttt

SEQ ID NO: 1563 - DNA, 51 bp, Artificial Sequence
  Synthetic polynucleotide
ggtggtgaggccctgggcaggttgghatcaaggttacaagacaggtttaag

SEQ ID NO: 1564 - DNA, 51 bp, Artificial Sequence
  Synthetic polynucleotide
ctgggcaacgtgctggtctgtgtgcyggcccatcactttggcaaagaattc

SEQ ID NO: 1565 - DNA, 51 bp, Artificial Sequence
  Synthetic polynucleotide
  misc_feature (26)..(26): n is a, c, g, t or u
caccgtgctgacctccaaataccgtnaagctggagcctcggtagccgttcc

SEQ ID NO: 1566 - DNA, 51 bp, Artificial Sequence
  Synthetic polynucleotide
ccacagactcagagagaacccaccayggtgctgtctcctgccgacaagacc

SEQ ID NO: 1567 - DNA, 51 bp, Artificial Sequence
  Synthetic polynucleotide
gctggcgagtatggtgcggaggcccyggagaggtgaggctccctcccctgc

SEQ ID NO: 1568 - DNA, 51 bp, Artificial Sequence
  Synthetic polynucleotide
caagaagtcactatcaaccagagccytcttcagcccctcaatgtggagatt

SEQ ID NO: 1569 - DNA, 51 bp, Artificial Sequence
  Synthetic polynucleotide
accaagctggccctggatctggagaytgccacctacaggaccctcctggag

SEQ ID NO: 1570 - DNA, 51 bp, Artificial Sequence
  Synthetic polynucleotide
gagctgatgaacaccaagctggcccyggatctggagattgccacctacagg

SEQ ID NO: 1571 - DNA, 51 bp, Artificial Sequence
  Synthetic polynucleotide
aaagtgcaggacatcaaaaacaaccygaaagaggcgattgaagtacgtgct

SEQ ID NO: 1572 - DNA, 51 bp, Artificial Sequence
  Synthetic polynucleotide
aggaaacacaacagaaatccgtgagyggatgccttctccccaggcggggat

SEQ ID NO: 1573 - DNA, 51 bp, Artificial Sequence
  Synthetic polynucleotide
tccttggtactttgcaggcagaccaygtggaccctggtgagctgggtggcc

SEQ ID NO: 1574 - DNA, 51 bp, Artificial Sequence
  Synthetic polynucleotide
ggtgattttgcacccagagtttctaycctccaccagtcccttactacccat

SEQ ID NO: 1575 - DNA, 51 bp, Artificial Sequence
  Synthetic polynucleotide
aggtataagaagagatttcataagtytgatgcagaccagaaaggctttatt

SEQ ID NO: 1576 - DNA, 51 bp, Artificial Sequence
  Synthetic polynucleotide
atcttcatgtcagtgggacttgtgcbgctggtaagtttggtgcctgcactg

SEQ ID NO: 1577 - DNA, 51 bp, Artificial Sequence
  Synthetic polynucleotide
gtgttcttttccctaatagggtgcayctgagaaagacatcgtgcactctgg

SEQ ID NO: 1578 - DNA, 51 bp, Artificial Sequence
  Synthetic polynucleotide
cttcgactacatctctgagtgcatcyccgacttcctggacaagcatcagat

SEQ ID NO: 1579 - DNA, 51 bp, Artificial Sequence
  Synthetic polynucleotide
ctcaacatgttaggagggcggcaagygattgcagcagtgaaatgggcaaag

SEQ ID NO: 1580 - DNA, 51 bp, Artificial Sequence
  Synthetic polynucleotide
tcaaatggaaatatcaaaaaacttcygtttcatcaaaagtgactgccttaa

SEQ ID NO: 1581 - DNA, 51 bp, Artificial Sequence
  Synthetic polynucleotide
ggttgaaaatctccttaactattgcytccaaacatttttggataagaccat

SEQ ID NO: 1582 - DNA, 51 bp, Artificial Sequence
  Synthetic polynucleotide
cgccacttgcaggagtaccaggaccygctcaatgtcaagctggccctggac

SEQ ID NO: 1583 - DNA, 51 bp, Artificial Sequence
  Synthetic polynucleotide
cggctcttccgcgagcgctatcggcygcaccccaagttcgtggcggccgtg

SEQ ID NO: 1584 - DNA, 51 bp, Artificial Sequence
  Synthetic polynucleotide
tttctccctgctttcctaggtatgtyctcctacgtcatgctggccagcagc

SEQ ID NO: 1585 - DNA, 51 bp, Artificial Sequence
  Synthetic polynucleotide
caagataacataaacatccacacaaytgaaagaaattctttcgtggggctg

SEQ ID NO: 1586 - DNA, 51 bp, Artificial Sequence
  Synthetic polynucleotide
ctcaatgtcctggcctttgtggtcayctgtggctgctatatccacatctac

SEQ ID NO: 1587 - DNA, 51 bp, Artificial Sequence
  Synthetic polynucleotide
agagacctggctgctcggaacattcygctgtcggaaagcgacgtggtgaag

SEQ ID NO: 1588 - DNA, 51 bp, Artificial Sequence
  Synthetic polynucleotide
ctgaagtggatggcccctgaaagcaycttcgacaaggtgtacaccacgcag

SEQ ID NO: 1589 - DNA, 51 bp, Artificial Sequence
  Synthetic polynucleotide
cacatcgaggtgaatgggagcaagaytggcccagacaacctgccttatgtc

SEQ ID NO: 1590 - DNA, 51 bp, Artificial Sequence
  Synthetic polynucleotide
cctgtacctggagatcatcatctatygcacaggggccttcctcatctcctg

SEQ ID NO: 1591 - DNA, 51 bp, Artificial Sequence
  Synthetic polynucleotide
tcctggaatctgtggtccagggacaygttacaacaccgttggcaactacac

SEQ ID NO: 1592 - DNA, 51 bp, Artificial Sequence
  Synthetic polynucleotide
ctgtttttgtgcagacattgacgaaygccgcatatctcctgacctctgtgg

SEQ ID NO: 1593 - DNA, 51 bp, Artificial Sequence
  Synthetic polynucleotide
tatccctggagagtacaggtgcttgygttatgatggattcatggcatctga

SEQ ID NO: 1594 - DNA, 51 bp, Artificial Sequence
  Synthetic polynucleotide
atccagatctaacttggggtggcttygtcttcttcttttgccaattccact

SEQ ID NO: 1595 - DNA, 51 bp, Artificial Sequence
  Synthetic polynucleotide
catgaatctccaactttaaatcctghaggtattgaaataggtatcagcttt

SEQ ID NO: 1596 - DNA, 51 bp, Artificial Sequence
  Synthetic polynucleotide
atcctggacacttgcctgtatgtgayggacagagcacaaatggacctctct

SEQ ID NO: 1597 - DNA, 51 bp, Artificial Sequence
  Synthetic polynucleotide
gctgaatgacacattggactatgaaygccatgatggttatgaaagcaatac

SEQ ID NO: 1598 - DNA, 51 bp, Artificial Sequence
  Synthetic polynucleotide
aagttaataaatttggcttatttgcytggaagtgattataccgaaggaata

SEQ ID NO: 1599 - DNA, 51 bp, Artificial Sequence
  Synthetic polynucleotide
ccagtttacaaatatgcccaagactycttggtggctattgcagagccagtg

SEQ ID NO: 1600 - DNA, 51 bp, Artificial Sequence
  Synthetic polynucleotide
ctgggtcgctgcgtgggccacgcccyggaggtggaggaggcgctgctctgc

SEQ ID NO: 1601 - DNA, 51 bp, Artificial Sequence
  Synthetic polynucleotide
cgcacaggcccccacgtggacagcayggaccgcggcacgctccctctggct

SEQ ID NO: 1602 - DNA, 51 bp, Artificial Sequence
  Synthetic polynucleotide
aaaccaatcagaaaacacaggaacabgcactgcaaggtttctttgttggat

SEQ ID NO: 1603 - DNA, 51 bp, Artificial Sequence
  Synthetic polynucleotide
caacttcgtcatgtcggccgcgcacygcgtggcgaatgtgtgagtagccgg

SEQ ID NO: 1604 - DNA, 51 bp, Artificial Sequence
  Synthetic polynucleotide
accatggcaaccttcaccatgacgcyggcacgggtctgcctctgccctatg

SEQ ID NO: 1605 - DNA, 51 bp, Artificial Sequence
  Synthetic polynucleotide
ccacatcacgctgagcacccatgagygtgccggcctttcagaacgggacat

SEQ ID NO: 1606 - DNA, 51 bp, Artificial Sequence
  Synthetic polynucleotide
ccccctctcctgcagaacgattcccygatgaggcagatgcgggaattggag

SEQ ID NO: 1607 - DNA, 51 bp, Artificial Sequence
  Synthetic polynucleotide
ctcaaggatgagatggcccgccatcygcgcgagtaccaggacctgctcaac

SEQ ID NO: 1608 - DNA, 51 bp, Artificial Sequence
  Synthetic polynucleotide
gttctgaagcaccaagtctgagctcrccactcgctccaaaaacagacccac

SEQ ID NO: 1609 - DNA, 51 bp, Artificial Sequence
  Synthetic polynucleotide
cggcgcctggcagaggcagagatgcygctgctgctgcaccacgtaagcagg

SEQ ID NO: 1610 - DNA, 51 bp, Artificial Sequence
  Synthetic polynucleotide
taccccgccgagaggctcacctcctyccggcctgcggcctgtgctgtaagt

SEQ ID NO: 1611 - DNA, 51 bp, Artificial Sequence
  Synthetic polynucleotide
ggcttccaagggcagcagtacattcyggaacgaggcgaatatccaagctgg

SEQ ID NO: 1612 - DNA, 51 bp, Artificial Sequence
  Synthetic polynucleotide
gcaaccccagctctatgagatgttcycttcggtgatgaaacacctgccagg

SEQ ID NO: 1613 - DNA, 51 bp, Artificial Sequence
  Synthetic polynucleotide
actccttgacaaggttcaagcctacycaactgctggagggaaggtgtggct

SEQ ID NO: 1614 - DNA, 51 bp, Artificial Sequence
  Synthetic polynucleotide
gactggagcgccttaggcaaactccytgacaaggttcaagcctactcaact

SEQ ID NO: 1615 - DNA, 51 bp, Artificial Sequence
  Synthetic polynucleotide
ctcctttgcagccacaacgaggatcvtaatgcgaaaaatgaagaggacggt

SEQ ID NO: 1616 - DNA, 51 bp, Artificial Sequence
  Synthetic polynucleotide
cttccccatctcccacatccggctaygggccctgcagctgatcttcgtgtc

SEQ ID NO: 1617 - DNA, 51 bp, Artificial Sequence
  Synthetic polynucleotide
atcttcgtgtccacgccagcgctccyagtggccatgcacgtggcctaccgg

SEQ ID NO: 1618 - DNA, 51 bp, Artificial Sequence
  Synthetic polynucleotide
aagtgtgaagtcattggggagcccaygccaacaatccactggcagaagaac

SEQ ID NO: 1619 - DNA, 51 bp, Artificial Sequence
  Synthetic polynucleotide
gagtgaaaacctctactccatcgccygcgacaagccacagcaggtgcgcaa

SEQ ID NO: 1620 - DNA, 51 bp, Artificial Sequence
  Synthetic polynucleotide
ctggtcatcctggttcccctgtaaghatagccattggtggtgttttcttcc

SEQ ID NO: 1621 - DNA, 51 bp, Artificial Sequence
  Synthetic polynucleotide
gttggacttggccctggaccaatggyatgcttatctgtttatcttagccaa

SEQ ID NO: 1622 - DNA, 51 bp, Artificial Sequence
  Synthetic polynucleotide
ttgcaaggtctgcctggtatcgctgyaagtaaactgtagccatctcgcaca

SEQ ID NO: 1623 - DNA, 51 bp, Artificial Sequence
  Synthetic polynucleotide
ttcgacgttggccctgtctgcttccygtaaactccctccatcccaacctgg

SEQ ID NO: 1624 - DNA, 51 bp, Artificial Sequence
  Synthetic polynucleotide
aaagggactcatgtttgggtaggccygtataagaatggcacccctgtaatg

SEQ ID NO: 1625 - DNA, 51 bp, Artificial Sequence
  Synthetic polynucleotide
tgacccaaggactggaatctttactygtcagataccaggaatatactattt

SEQ ID NO: 1626 - DNA, 51 bp, Artificial Sequence
  Synthetic polynucleotide
cgatctcacagaaaatgaccaggtgyggctccagcttcccaatgccgagtc

SEQ ID NO: 1627 - DNA, 51 bp, Artificial Sequence
  Synthetic polynucleotide
atactcctctgagtatgtccactccyctttctcaggattcctagtggctcc

SEQ ID NO: 1628 - DNA, 51 bp, Artificial Sequence
  Synthetic polynucleotide
tcagataccaggaatatactattttycataccacgtgcatgtgaaagggac

SEQ ID NO: 1629 - DNA, 51 bp, Artificial Sequence
  Synthetic polynucleotide
atgtatctcaacaaccgcctggcccygcctgtcaactccagccctgccgtg

SEQ ID NO: 1630 - DNA, 51 bp, Artificial Sequence
  Synthetic polynucleotide
atcatgccggagcctgagcacgtcabcgtagcctgctgcaatcaggtaagc

SEQ ID NO: 1631 - DNA, 51 bp, Artificial Sequence
  Synthetic polynucleotide
gatctgttcactcagttgagaaagayagtcaaaatggcttccaacgaggac

SEQ ID NO: 1632 - DNA, 51 bp, Artificial Sequence
  Synthetic polynucleotide
tgccaagatgacgataaacccaattyatgagcacgtaggatacacaacctt

SEQ ID NO: 1633 - DNA, 51 bp, Artificial Sequence
  Synthetic polynucleotide
ttctggtgccactaccacagctcctbctctgagtggtaaaggcaatcctga

SEQ ID NO: 1634 - DNA, 51 bp, Artificial Sequence
  Synthetic polynucleotide
acatatattttctttttcagttcttycgggaggaccattgcctcaagggca

SEQ ID NO: 1635 - DNA, 51 bp, Artificial Sequence
  Synthetic polynucleotide
ccttctgggaaggtggtcatcacacygttcaggtattgggatggtggctgg

SEQ ID NO: 1636 - DNA, 51 bp, Artificial Sequence
  Synthetic polynucleotide
ctttggactctggggtttcaacagcyctctggcctgcattgcaatgggagg

SEQ ID NO: 1637 - DNA, 51 bp, Artificial Sequence
  Synthetic polynucleotide
gacacactgccaccagcacaaatacygcgaccccagtgcgtgcgctgttgg

SEQ ID NO: 1638 - DNA, 51 bp, Artificial Sequence
  Synthetic polynucleotide
agtgtgcggctcccccacaggcctgyccatcctcatggagcccatcctgtc

SEQ ID NO: 1639 - DNA, 51 bp, Artificial Sequence
  Synthetic polynucleotide
gggtagtggcagcgacacactgcgaygcctggccctggccactcatgacaa

SEQ ID NO: 1640 - DNA, 51 bp, Artificial Sequence
  Synthetic polynucleotide
tccccacaaatggctattggtgaatyttgactgttctgccatgtggtaagt

SEQ ID NO: 1641 - DNA, 51 bp, Artificial Sequence
  Synthetic polynucleotide
atacaaaaagtatgagaagtctgtgyaagtaatacaactttggaagattta

SEQ ID NO: 1642 - DNA, 51 bp, Artificial Sequence
  Synthetic polynucleotide
acccctggtgggcgccatcctgggcyccctcctctacaactacgtgctgtt

SEQ ID NO: 1643 - DNA, 51 bp, Artificial Sequence
  Synthetic polynucleotide
gctgggcgcggacatggaggacgtgygcggccgcctggtgcagtaccgcgg

SEQ ID NO: 1644 - DNA, 51 bp, Artificial Sequence
  Synthetic polynucleotide
tggcagagcggccagcgctgggaacyggcactgggtcgcttttgggattac

SEQ ID NO: 1645 - DNA, 51 bp, Artificial Sequence
  Synthetic polynucleotide
ctccagcctaaagctccttgacaacygggacagcgtgacctccaccttcag

SEQ ID NO: 1646 - DNA, 51 bp, Artificial Sequence
  Synthetic polynucleotide
ctgaggcaggagatgagcaaggatcyggaggaggtgaaggccaaggtgcag

SEQ ID NO: 1647 - DNA, 51 bp, Artificial Sequence
  Synthetic polynucleotide
tacagcgacgagctgcgccagcgctyggccgcgcgccttgaggctctcaag

SEQ ID NO: 1648 - DNA, 51 bp, Artificial Sequence
  Synthetic polynucleotide
aatatttctcatcattattgtaatayttctgatcatgttggtgatccatca

SEQ ID NO: 1649 - DNA, 51 bp, Artificial Sequence
  Synthetic polynucleotide
tgtcgatctgttcagccctgaaaagyccaaactcccaggtttgtctaggaa

SEQ ID NO: 1650 - DNA, 51 bp, Artificial Sequence
  Synthetic polynucleotide
gtttgacaccatatctgagaaaacayctgatcagatccacttcttctttgc

SEQ ID NO: 1651 - DNA, 51 bp, Artificial Sequence
  Synthetic polynucleotide
aaggtttatcttttgtccttgctgcycattggcttctgggactgcgtgacc

SEQ ID NO: 1652 - DNA, 51 bp, Artificial Sequence
  Synthetic polynucleotide
cagagcggccatcaacaaatgggtgyccaataagaccgaaggccgaatcac

SEQ ID NO: 1653 - DNA, 51 bp, Artificial Sequence
  Synthetic polynucleotide
ttttgctatgaccaagctgggtgccygtaatgacaccctccagcaactgat

SEQ ID NO: 1654 - DNA, 51 bp, Artificial Sequence
  Synthetic polynucleotide
gataagaatgtcatcttctccccacygagcatctccaccgccttggccttc

SEQ ID NO: 1655 - DNA, 51 bp, Artificial Sequence
  Synthetic polynucleotide
aatcagtatgtcaacgtgatgaacahgcttcttttcacactccctggaact

SEQ ID NO: 1656 - DNA, 51 bp, Artificial Sequence
  Synthetic polynucleotide
aatcgagcatgctattccagtgtacygaacatactgtatacctcgtgttag

SEQ ID NO: 1657 - DNA, 51 bp, Artificial Sequence
  Synthetic polynucleotide
cctgaatggactgcgtggctcatctyggctgtgatttcagtatatggtaaa

SEQ ID NO: 1658 - DNA, 51 bp, Artificial Sequence
  Synthetic polynucleotide
ttttatacccggaaggatgggcagcygtacgtatgagttttgttttattat

SEQ ID NO: 1659 - DNA, 51 bp, Artificial Sequence
  Synthetic polynucleotide
cttttctaggtcatccatgcctggcbtattatatcatctctattgttgctg

SEQ ID NO: 1660 - DNA, 51 bp, Artificial Sequence
  Synthetic polynucleotide
tatggcgccaagcatgtgatcatgcyctttgtccctgtgactctctgcatg

SEQ ID NO: 1661 - DNA, 51 bp, Artificial Sequence
  Synthetic polynucleotide
gccttcaaggacaagtacaagcagcycttcttagggggtgtggatcggcat

SEQ ID NO: 1662 - DNA, 51 bp, Artificial Sequence
  Synthetic polynucleotide
tggcaccacaccttctacaacgagcytcgcgtggctcccgaggagcacccc

SEQ ID NO: 1663 - DNA, 51 bp, Artificial Sequence
  Synthetic polynucleotide
aaggagaagctgtgctacgtggcccyggacttcgagaacgagatggcgacg

SEQ ID NO: 1664 - DNA, 51 bp, Artificial Sequence
  Synthetic polynucleotide
ctcaccctcccatccccaggaaccaygaacgctgcctgtgagctgctgggc

SEQ ID NO: 1665 - DNA, 51 bp, Artificial Sequence
  Synthetic polynucleotide
caccacttcccactccaggctgagcyggagattcagaaagacgccctggag

SEQ ID NO: 1666 - DNA, 51 bp, Artificial Sequence
  Synthetic polynucleotide
tacgacgagtcgggcccctccatcgyccaccgcaaatgcttctaaacggac

SEQ ID NO: 1667 - DNA, 51 bp, Artificial Sequence
  Synthetic polynucleotide
ccggctgaagtggaatgctgaagaayttggaaacatcagtgtcctgcgcct

SEQ ID NO: 1668 - DNA, 51 bp, Artificial Sequence
  Synthetic polynucleotide
gccctggccctcacactctccaaccycatctccctggtgagaggccctccg

SEQ ID NO: 1669 - DNA, 51 bp, Artificial Sequence
  Synthetic polynucleotide
ctctgtcttactgtctttgactgtgytccttctggtcatcgtggagctgat

SEQ ID NO: 1670 - DNA, 51 bp, Artificial Sequence
  Synthetic polynucleotide
ggagaaagagttttatggtgtgcttyaagagccctgcagaaaaagtaggta

SEQ ID NO: 1671 - DNA, 51 bp, Artificial Sequence
  Synthetic polynucleotide
agagggagctaggaggctagcatagraaggagaraaggaaaaagactttga

SEQ ID NO: 1672 - DNA, 51 bp, Artificial Sequence
  Synthetic polynucleotide
tataaagactgaggggcaaacagcasgggaaatgaggggcatagggataag

SEQ ID NO: 1673 - DNA, 51 bp, Artificial Sequence
  Synthetic polynucleotide
cgcagacagaagggctgggacggctrtcagcgcctgtgcttccaagrtaag

SEQ ID NO: 1674 - DNA, 51 bp, Artificial Sequence
  Synthetic polynucleotide
atcaggaagccttaccccacgcccaytgcctgcacaagcctcaggcctatg

SEQ ID NO: 1675 - DNA, 51 bp, Artificial Sequence
  Synthetic polynucleotide
caactgcctgggtgcctggatcaagygcggcagtgtgcagcagcatctctt

SEQ ID NO: 1676 - DNA, 51 bp, Artificial Sequence
  Synthetic polynucleotide
tgtccggaggaccacctttatgtccyagagcataatttgcatctactgatt

SEQ ID NO: 1677 - DNA, 51 bp, Artificial Sequence
  Synthetic polynucleotide
ctgtacaaacgctatgggggcttctygcggcgcattcgtcccaagctcaag

SEQ ID NO: 1678 - DNA, 51 bp, Artificial Sequence
  Synthetic polynucleotide
gtgaaggagaagatcacagcttttgyggtggagaggggcttcgggggcatt

SEQ ID NO: 1679 - DNA, 51 bp, Artificial Sequence
  Synthetic polynucleotide
ggagatttcattttctacagtgttcyggttggtaaagcctcagcaacagcc

SEQ ID NO: 1680 - DNA, 51 bp, Artificial Sequence
  Synthetic polynucleotide
ccacacttctgtgcccctgcaggagygctatttagcatcgaggtcacctcc

SEQ ID NO: 1681 - DNA, 51 bp, Artificial Sequence
  Synthetic polynucleotide
gttcggaactactggagaggattctytgcagccacgttcagcgcctttgtg

SEQ ID NO: 1682 - DNA, 51 bp, Artificial Sequence
  Synthetic polynucleotide
caatggagcggtgaatgggaaggggycactcaagggacagcccggagacat

SEQ ID NO: 1683 - DNA, 51 bp, Artificial Sequence
  Synthetic polynucleotide
agagagtgtgtggggtgatgagaaaycttccttcatctgcaacacactcca

SEQ ID NO: 1684 - DNA, 51 bp, Artificial Sequence
  Synthetic polynucleotide
atatccccgtttacacacaaattcarctgattcacctgttctcgaataaag

SEQ ID NO: 1685 - DNA, 51 bp, Artificial Sequence
  Synthetic polynucleotide
gaacttatcattgctgcttttgattaagatattggtcaaagagtacaaact

SEQ ID NO: 1686 - DNA, 51 bp, Artificial Sequence
  Synthetic polynucleotide
ttcagctataatatgaataagaacttggaatcaaacatagagatctagtga

SEQ ID NO: 1687 - DNA, 51 bp, Artificial Sequence
  Synthetic polynucleotide
ggggatgacagacaggtgcagggccrgcagctcgtagcacctgacagcctc

SEQ ID NO: 1688 - DNA, 51 bp, Artificial Sequence
  Synthetic polynucleotide
gctggggtagaggtcctgaaccaggrggatgagggcaagcaggtcggccgg

SEQ ID NO: 1689 - DNA, 51 bp, Artificial Sequence
  Synthetic polynucleotide
cctcttcaacatcggcctcctcctcytcctggtcatgttcatctactccat

SEQ ID NO: 1690 - DNA, 51 bp, Artificial Sequence
  Synthetic polynucleotide
accttcatgctgctcttcgtcctggbgtgtgagattgcagagggcatcctg

SEQ ID NO: 1691 - DNA, 51 bp, Artificial Sequence
  Synthetic polynucleotide
atcgagacttccaacttccccaagcygctaattggtaggtgaggtgtagga

SEQ ID NO: 1692 - DNA, 51 bp, Artificial Sequence
  Synthetic polynucleotide
ttcctgcagcccttcgtgaatctgcygtccaaaggcacctactggtggatg

SEQ ID NO: 1693 - DNA, 51 bp, Artificial Sequence
  Synthetic polynucleotide
attacttcataatatattgctgttaygtgttttaggccatgaccacaatgt

SEQ ID NO: 1694 - DNA, 51 bp, Artificial Sequence
  Synthetic polynucleotide
ccgtgcccgccagcggagggcccgcbttgtgtccaagaaaggcaactgcaa

SEQ ID NO: 1695 - DNA, 51 bp, Artificial Sequence
  Synthetic polynucleotide
gtgggtggcaacagcatcttcctggyggccccgctgatcatctaccatgtc

SEQ ID NO: 1696 - DNA, 51 bp, Artificial Sequence
  Synthetic polynucleotide
ggcagcagcctgagagatggctcgcyggagctcatggtgagtgggtcagag

SEQ ID NO: 1697 - DNA, 51 bp, Artificial Sequence
  Synthetic polynucleotide
gacttttcagctctttgtcctaaggyattttttgtttagttttcaatttgt

SEQ ID NO: 1698 - DNA, 51 bp, Artificial Sequence
  Synthetic polynucleotide
ctacgggggtgacgacatcccacttyctccttatcgcatccgagccacaca

SEQ ID NO: 1699 - DNA, 51 bp, Artificial Sequence
  Synthetic polynucleotide
ctccagtgaccgaacaattaaagaayatgcccaaaacatctggaacgtgga

SEQ ID NO: 1700 - DNA, 51 bp, Artificial Sequence
  Synthetic polynucleotide
ccttgctctgcgatggactattcccyggctgcagccctcactcttcatggt

SEQ ID NO: 1701 - DNA, 51 bp, Artificial Sequence
  Synthetic polynucleotide
taagtattgtgaaaactctgttttthtcaggtcgaatgagtgatttgagtg

SEQ ID NO: 1702 - DNA, 51 bp, Artificial Sequence
  Synthetic polynucleotide
tgagacctatgcagatgccctgtggyggggcctggtgagtcactaccttgg

SEQ ID NO: 1703 - DNA, 51 bp, Artificial Sequence
  Synthetic polynucleotide
tccaccccctgcagtgtcattggtcygagcttcgacttcgtggctctgaac

SEQ ID NO: 1704 - DNA, 51 bp, Artificial Sequence
  Synthetic polynucleotide
gaacgagtgtgccaccgagaaccccygcgtgcaaacctgcgtcaacaccta

SEQ ID NO: 1705 - DNA, 51 bp, Artificial Sequence
  Synthetic polynucleotide
tgatggttgtaagagtggaattaacygccctatccaaaaagacaagaccta

SEQ ID NO: 1706 - DNA, 51 bp, Artificial Sequence
  Synthetic polynucleotide
catggtaagtatattgtaaaatacayatgtactaagaattttcaaaattgg

SEQ ID NO: 1707 - DNA, 51 bp, Artificial Sequence
  Synthetic polynucleotide
ctcgtgggggatgttagcgtgcctgygcacggtgctctggcacctccctgc

SEQ ID NO: 1708 - DNA, 51 bp, Artificial Sequence
  Synthetic polynucleotide
cctgcacctgggggctcatggcttcygacttctgaccttctcctcttcgct

SEQ ID NO: 1709 - DNA, 51 bp, Artificial Sequence
  Synthetic polynucleotide
ctgccctttgccgagcgcctgcagcycctctctggacaccctcctgcctct

SEQ ID NO: 1710 - DNA, 51 bp, Artificial Sequence
  Synthetic polynucleotide
ccggggcgcctcccgccaggcaccayggtgcagaagtcgcgcaacggcggc

SEQ ID NO: 1711 - DNA, 51 bp, Artificial Sequence
  Synthetic polynucleotide
tgcatttcctttcttcccagagacaytgctgccagaaactgcctcttgacc

SEQ ID NO: 1712 - DNA, 51 bp, Artificial Sequence
  Synthetic polynucleotide
ttccttctccttttcctttaccagaygtgcagtatgtgaagctccagctgt

SEQ ID NO: 1713 - DNA, 51 bp, Artificial Sequence
  Synthetic polynucleotide
cttttcctttaccagatgtgcagtaygtgaagctccagctgtggtgatcgc

SEQ ID NO: 1714 - DNA, 51 bp, Artificial Sequence
  Synthetic polynucleotide
cagtcagacgatccagattccccatygtcctcagggatgggattctctgtg

SEQ ID NO: 1715 - DNA, 51 bp, Artificial Sequence
  Synthetic polynucleotide
taagaagcttaaacttcaaacagctyctatccaagcactgtgttccccctc

SEQ ID NO: 1716 - DNA, 51 bp, Artificial Sequence
  Synthetic polynucleotide
agacttgaggacacgaattagccgaygtcaagtgtgcatgaagaggacata

SEQ ID NO: 1717 - DNA, 51 bp, Artificial Sequence
  Synthetic polynucleotide
atttcctatagctcctgagtattggygttccattgcttactttgaaatgga

SEQ ID NO: 1718 - DNA, 51 bp, Artificial Sequence
  Synthetic polynucleotide
ggacccttctggaggagatcgctttygtttgggtcaactctccaatgtcca

SEQ ID NO: 1719 - DNA, 51 bp, Artificial Sequence
  Synthetic polynucleotide
attgaaattcacttacaccgggcccbccagctcctagacgaagtacttcat

SEQ ID NO: 1720 - DNA, 51 bp, Artificial Sequence
  Synthetic polynucleotide
  misc_feature (26)..(26): n is a, c, g, t or u
taaagctggctatggcacctgcaacngcttccctgaggaggagaagtgctt

SEQ ID NO: 1721 - DNA, 51 bp, Artificial Sequence
  Synthetic polynucleotide
accacccccacccacagatccactgygcgacgagctgtgccgcacggtgat

SEQ ID NO: 1722 - DNA, 51 bp, Artificial Sequence
  Synthetic polynucleotide
gctctcatcagccgccaagaggcctyggagctcatgaaccagaaccttgac

SEQ ID NO: 1723 - DNA, 51 bp, Artificial Sequence
  Synthetic polynucleotide
gaacccatgcctggagcctcaccgcytcaatgacacagaggtgattcctgc

SEQ ID NO: 1724 - DNA, 51 bp, Artificial Sequence
  Synthetic polynucleotide
tttggcatcttcacatgctttgatayattgttctttgaccctgccatcaga

SEQ ID NO: 1725 - DNA, 51 bp, Artificial Sequence
  Synthetic polynucleotide
gatatattgttctttgaccctgccaycagagtcctcagagactacaaggtg

SEQ ID NO: 1726 - DNA, 51 bp, Artificial Sequence
  Synthetic polynucleotide
actgcctggatgaaccagctcccacycttggcagcaattgagattcagaaa

SEQ ID NO: 1727 - DNA, 51 bp, Artificial Sequence
  Synthetic polynucleotide
ccatagtaagtttttaaaaattttgycaggcgatccgtactgtgagaagga

SEQ ID NO: 1728 - DNA, 51 bp, Artificial Sequence
  Synthetic polynucleotide
gagatgatgtatgacaatttcacccyggtccctgtctggggaaaggaaggc

SEQ ID NO: 1729 - DNA, 51 bp, Artificial Sequence
  Synthetic polynucleotide
gggaaaggaaggctatctccacgtcygttccaatggcctctgctgttattt

SEQ ID NO: 1730 - DNA, 51 bp, Artificial Sequence
  Synthetic polynucleotide
tctccacgtctgttccaatggcctcygctgttatttactttacgagaggcc

SEQ ID NO: 1731 - DNA, 51 bp, Artificial Sequence
  Synthetic polynucleotide
cacggggatatttgagtttcacctgyggggcaacttcagtacttcctatat

SEQ ID NO: 1732 - DNA, 51 bp, Artificial Sequence
  Synthetic polynucleotide
tccttgtcggtaggtgaatccccagbacgatagcaccttcctgtttgacaa

SEQ ID NO: 1733 - DNA, 51 bp, Artificial Sequence
  Synthetic polynucleotide
tgcagcctgatgcccccagtccaggyaacctggctccaactgctgctgggg

SEQ ID NO: 1734 - DNA, 51 bp, Artificial Sequence
  Synthetic polynucleotide
gatactcctttacctcaggacccagygatcatccccttttccaagcaaagt

SEQ ID NO: 1735 - DNA, 51 bp, Artificial Sequence
  Synthetic polynucleotide
tcaggacccagtgatcatcccctttyccaagcaaagtctgctcgaggagtc

SEQ ID NO: 1736 - DNA, 51 bp, Artificial Sequence
  Synthetic polynucleotide
ttccaagcaaagtctgctcgaggagyctggtaactatggatttcccctctt

SEQ ID NO: 1737 - DNA, 51 bp, Artificial Sequence
  Synthetic polynucleotide
tggtcggatgtaacgctgccactcahgtcggtccctgagatccgggctgtt

SEQ ID NO: 1738 - DNA, 51 bp, Artificial Sequence
  Synthetic polynucleotide
tcggtccctgagatccgggctgttgytgatgcatgggcctcagtcacagag

SEQ ID NO: 1739 - DNA, 51 bp, Artificial Sequence
  Synthetic polynucleotide
tgagatccgggctgttgttgatgcabgggcctcagtcacagaggagctggg

SEQ ID NO: 1740 - DNA, 51 bp, Artificial Sequence
  Synthetic polynucleotide
gcatgggcctcagtcacagaggagcygggtgcccagtacccttgggtgcag

SEQ ID NO: 1741 - DNA, 51 bp, Artificial Sequence
  Synthetic polynucleotide
agaggagctgggtgcccagtaccctygggtgcaggtttgtgaggtcgcccc

SEQ ID NO: 1742 - DNA, 51 bp, Artificial Sequence
  Synthetic polynucleotide
ggtgcccagtacccttgggtgcaggyttgtgaggtcgccccttcccctgga

SEQ ID NO: 1743 - DNA, 51 bp, Artificial Sequence
  Synthetic polynucleotide
gagctccgtatccctatctgatagahctttgaaaacaaaggtgccatgatg

SEQ ID NO: 1744 - DNA, 51 bp, Artificial Sequence
  Synthetic polynucleotide
tgacaggtatgggccagcagtttccygccagatattgcccagcgtgaggag

SEQ ID NO: 1745 - DNA, 51 bp, Artificial Sequence
  Synthetic polynucleotide
tataagagtcagcatggagagccccygctaatggagtacagccgccaggag

SEQ ID NO: 1746 - DNA, 51 bp, Artificial Sequence
  Synthetic polynucleotide
ctaatggagtacagccgccaggagcyactcaggaaggtgggagagagccaa

SEQ ID NO: 1747 - DNA, 51 bp, Artificial Sequence
  Synthetic polynucleotide
agccgccaggagctactcaggaaggygggagagagccaagccctgtgtccc

SEQ ID NO: 1748 - DNA, 51 bp, Artificial Sequence
  Synthetic polynucleotide
agtactggtccccttctgggcaacayggccctaccagacactgctgctgcc

SEQ ID NO: 1749 - DNA, 51 bp, Artificial Sequence
  Synthetic polynucleotide
ccattggcagctgcacgctcattacbaccctccgctcctgcgctctgccac

SEQ ID NO: 1750 - DNA, 51 bp, Artificial Sequence
  Synthetic polynucleotide
cacgctcattactaccctccgctccygcgctctgccactgtccggaaattc

SEQ ID NO: 1751 - DNA, 51 bp, Artificial Sequence
  Synthetic polynucleotide
ggacagggagacagcaaccatcgccygaccacgccgaccacagggccttga

SEQ ID NO: 1752 - DNA, 51 bp, Artificial Sequence
  Synthetic polynucleotide
agaagagggcttcgtggagttgaagyctcccgcggtgagcggcgggctcgg

SEQ ID NO: 1753 - DNA, 51 bp, Artificial Sequence
  Synthetic polynucleotide
catcaagtcttccttggtgaacgagyctgaaatcatcccggccagcaacgg

SEQ ID NO: 1754 - DNA, 51 bp, Artificial Sequence
  Synthetic polynucleotide
gggtgactccgggggcccgctggtgygcgggggcgtgctcgagggcgtggt

SEQ ID NO: 1755 - DNA, 51 bp, Artificial Sequence
  Synthetic polynucleotide
cccaacgtggatgagcattctgttaygacctacctgtcccagttccccaag

SEQ ID NO: 1756 - DNA, 51 bp, Artificial Sequence
  Synthetic polynucleotide
atttttggggagcgccaggggatgcyggaggaagtagtgaaccccgaggcc

SEQ ID NO: 1757 - DNA, 51 bp, Artificial Sequence
  Synthetic polynucleotide
ataataatgatggttgccaacatgcgctgagtgcttaaaatgtgccaggta

SEQ ID NO: 1758 - DNA, 51 bp, Artificial Sequence
  Synthetic polynucleotide
ataaataggtaaagggctttagaattgtgcaccatactcacaaccaccctg

SEQ ID NO: 1759 - DNA, 51 bp, Artificial Sequence
  Synthetic polynucleotide
cgcagcagattctgttattaaaccccttttacagacgaagttgaggctcac

SEQ ID NO: 1760 - DNA, 51 bp, Artificial Sequence
  Synthetic polynucleotide
agagattatgtaactcactcaagacaacacagataaaagatgaaactgaat

SEQ ID NO: 1761 - DNA, 51 bp, Artificial Sequence
  Synthetic polynucleotide
acaaattctacttactcctttgggtraagcatattcacccagaactgttgc

SEQ ID NO: 1762 - DNA, 51 bp, Artificial Sequence
  Synthetic polynucleotide
caacggggaccctgtctgcaacgccygtggcctctactacaagctgcacaa

SEQ ID NO: 1763 - DNA, 51 bp, Artificial Sequence
  Synthetic polynucleotide
caggaacttcacaacttattggaggyaataactttgtaagtggaacttact

SEQ ID NO: 1764 - DNA, 51 bp, Artificial Sequence
  Synthetic polynucleotide
gggcggcccctccatcaaggacaagbatgtgacggcgctctacttcacctt

SEQ ID NO: 1765 - DNA, 51 bp, Artificial Sequence
  Synthetic polynucleotide
ggaggaagaaccccaggtggacgtaygggagttgctgaagaacgcgaaacc

SEQ ID NO: 1766 - DNA, 51 bp, Artificial Sequence
  Synthetic polynucleotide
cattccaagacacctgaagcaaaccyatatccgcagagttggagaagctgt

SEQ ID NO: 1767 - DNA, 51 bp, Artificial Sequence
  Synthetic polynucleotide
aaactggtgaaggatggataccaaayggcccagcctgcatttgccccaaag

SEQ ID NO: 1768 - DNA, 51 bp, Artificial Sequence
  Synthetic polynucleotide
ttgaccaatggtcatgtggccaagaytggggacttcgggctggctagggac

SEQ ID NO: 1769 - DNA, 51 bp, Artificial Sequence
  Synthetic polynucleotide
gccgcgggactggctctggggcggcygcggcgacaacatcgactatggcta

SEQ ID NO: 1770 - DNA, 51 bp, Artificial Sequence
  Synthetic polynucleotide
ctccacattccaactatgtaaaatabgtgctgaaaatgataaggatgtaaa

SEQ ID NO: 1771 - DNA, 51 bp, Artificial Sequence
  Synthetic polynucleotide
tgataaggatgtaaagattgagcccygtggacacctcatgtgcacatcctg

SEQ ID NO: 1772 - DNA, 51 bp, Artificial Sequence
  Synthetic polynucleotide
cagctgcaggctttggagcgtgtctytgagcggacacactatcctgatgct

SEQ ID NO: 1773 - DNA, 51 bp, Artificial Sequence
  Synthetic polynucleotide
gcggcggccagggaggactacgtgcyggtggctggccactaccccgtgtgg

SEQ ID NO: 1774 - DNA, 51 bp, Artificial Sequence
  Synthetic polynucleotide
ggctccccaacctgaagttaggagayatgtacttcctttgaatattgacaa

SEQ ID NO: 1775 - DNA, 51 bp, Artificial Sequence
  Synthetic polynucleotide
tgagaacaatccagaaaggaaccacyggcattatcgagacctggaagctat

SEQ ID NO: 1776 - DNA, 51 bp, Artificial Sequence
  Synthetic polynucleotide
catcctcaaacgaaacatccagcagyacaacagttttgtgtcactgtctgt

SEQ ID NO: 1777 - DNA, 51 bp, Artificial Sequence
  Synthetic polynucleotide
ccatctttgctttctccaggtgaaaytgcactactgatgaatcgtcctcgt

SEQ ID NO: 1778 - DNA, 51 bp, Artificial Sequence
  Synthetic polynucleotide
gaaatactacttctaccatggccttycctggccccaggtgggcagcttctg

SEQ ID NO: 1779 - DNA, 51 bp, Artificial Sequence
  Synthetic polynucleotide
gtgtttgaagagttttgtcgggagaytggtgtgcgcaacatccgggagttt

SEQ ID NO: 1780 - DNA, 51 bp, Artificial Sequence
  Synthetic polynucleotide
cgacccagatctgcggagtctgttcyccagggcaggaatcagcgaggccca

SEQ ID NO: 1781 - DNA, 51 bp, Artificial Sequence
  Synthetic polynucleotide
acctctaaacttatctacgacttcaytgaggaccagggtgggctggaggct

SEQ ID NO: 1782 - DNA, 51 bp, Artificial Sequence
  Synthetic polynucleotide
ttggtgcaactccaaataaaagtaayaaccatgcacactactataaccacc

SEQ ID NO: 1783 - DNA, 51 bp, Artificial Sequence
  Synthetic polynucleotide
tcgaatttgcaattcaatatgaaaaycacctcggagctggtaaaaagaggc

SEQ ID NO: 1784 - DNA, 51 bp, Artificial Sequence
  Synthetic polynucleotide
gacaacagaggcttacgaccccttayttaccgagaaagctcacaagaactg

SEQ ID NO: 1785 - DNA, 51 bp, Artificial Sequence
  Synthetic polynucleotide
ggagatgacttgattgtgactccatbtgctcaggtaagcacagcttggtga

SEQ ID NO: 1786 - DNA, 51 bp, Artificial Sequence
  Synthetic polynucleotide
gttacccgtggtgcctcacgctgagygcaaaactagctatgagtcccgctc

SEQ ID NO: 1787 - DNA, 51 bp, Artificial Sequence
  Synthetic polynucleotide
tttacaagatgaatatgacttcaaaygcaaaaccttgcagaacagaggtaa

SEQ ID NO: 1788 - DNA, 51 bp, Artificial Sequence
  Synthetic polynucleotide
tgctgtgagagccattggaagactgycctctatggcaatgatctcagggct

SEQ ID NO: 1789 - DNA, 51 bp, Artificial Sequence
  Synthetic polynucleotide
tcacccgtggtggtggcctcgtcgcyagggctcgtgtcgctgggcggcaag

SEQ ID NO: 1790 - DNA, 51 bp, Artificial Sequence
  Synthetic polynucleotide
gaggaacgaatgatcagggagaaacbgaaggcaacctgtatgccagcctgg

SEQ ID NO: 1791 - DNA, 51 bp, Artificial Sequence
  Synthetic polynucleotide
gttgatgaccttcgtcgcttatgcayactcaggatgagttttgtgaaaggc

SEQ ID NO: 1792 - DNA, 51 bp, Artificial Sequence
  Synthetic polynucleotide
ctgttgctcacagctgtggaccttcygggccgggaccgtgatgggctgggt

SEQ ID NO: 1793 - DNA, 51 bp, Artificial Sequence
  Synthetic polynucleotide
aagaaacgtgctcgagtacagtggtytgtccgattctgtgaagtccctgcc

SEQ ID NO: 1794 - DNA, 51 bp, Artificial Sequence
  Synthetic polynucleotide
ctcggctgtcctggctctgcaggagygtgaccactcccagacagactccct

SEQ ID NO: 1795 - DNA, 51 bp, Artificial Sequence
  Synthetic polynucleotide
ctgtggtggttattgctctgtgttayaaactctgggaaattccatctcttg

SEQ ID NO: 1796 - DNA, 51 bp, Artificial Sequence
  Synthetic polynucleotide
tggtgtaatggagtgatagtacgttdgtggaaagatgaagaatggacattc

SEQ ID NO: 1797 - DNA, 51 bp, Artificial Sequence
  Synthetic polynucleotide
ctgcagcgagtgctctaccgccacaygcaggccaagggcgtgctgctgact

SEQ ID NO: 1798 - DNA, 51 bp, Artificial Sequence
  Synthetic polynucleotide
gagatttcttttaagcaacaacagtrcaaaaccactgcaggtatgtaaatc

SEQ ID NO: 1799 - DNA, 51 bp, Artificial Sequence
  Synthetic polynucleotide
ttgcctctctgccttccaggtcttcyccaagatcttcagccacgaggccct

SEQ ID NO: 1800 - DNA, 51 bp, Artificial Sequence
  Synthetic polynucleotide
gttcaccaacggcatgcgccatggcyacggagtacgccagagcgtgcccta

SEQ ID NO: 1801 - DNA, 51 bp, Artificial Sequence
  Synthetic polynucleotide
ccccagcgttttgggtgctccggggrtgacaccagtaagggttcagcagtg

SEQ ID NO: 1802 - DNA, 51 bp, Artificial Sequence
  Synthetic polynucleotide
ctttatctgcataataaccagcttcyagctggagggctgcatgcagggaag

SEQ ID NO: 1803 - DNA, 51 bp, Artificial Sequence
  Synthetic polynucleotide
cagagacatcatgttggaagaattaycccatctcagtaaccgtggtgccag

SEQ ID NO: 1804 - DNA, 51 bp, Artificial Sequence
  Synthetic polynucleotide
ccaataattttcaaggaagaaaatcytagggtaaggtgacttaggttttat

SEQ ID NO: 1805 - DNA, 51 bp, Artificial Sequence
  Synthetic polynucleotide
ttgtcctatccctcctccagggcccygcactcagaagggaagttacctaaa

SEQ ID NO: 1806 - DNA, 51 bp, Artificial Sequence
  Synthetic polynucleotide
attttgttctttctatttgaagctcytttaagagcctgtgccgatggaggt

SEQ ID NO: 1807 - DNA, 51 bp, Artificial Sequence
  Synthetic polynucleotide
tgtcccttctcactgaccatctctcycaacagctccaattatgctttcatg

SEQ ID NO: 1808 - DNA, 51 bp, Artificial Sequence
  Synthetic polynucleotide
cccattcttccatttgctccgcagcyggtattccctctcgagtggtttcca

SEQ ID NO: 1809 - DNA, 51 bp, Artificial Sequence
  Synthetic polynucleotide
tttgtgaggtccagcacctacagccygatccccatcactgtggccgaggca

SEQ ID NO: 1810 - DNA, 51 bp, Artificial Sequence
  Synthetic polynucleotide
ctggtggcccaggtggatagtggccyctaccctgggctcatctggctacac

SEQ ID NO: 1811 - DNA, 51 bp, Artificial Sequence
  Synthetic polynucleotide
ggaaatgttggcatagtgatgtcctyggaacaaataaaggtaaacagcatg

SEQ ID NO: 1812 - DNA, 51 bp, Artificial Sequence
  Synthetic polynucleotide
tttattttttagcgtattttctcacygctagaaaagacttggcttggcgca

SEQ ID NO: 1813 - DNA, 51 bp, Artificial Sequence
  Synthetic polynucleotide
aagtaaaaaataccagtctgatatgyactgggcacagtcacaagatggact

SEQ ID NO: 1814 - DNA, 51 bp, Artificial Sequence
  Synthetic polynucleotide
gtagtcctcaaggtttataagaatgwgagtcatggagcaacaggtcctctt

SEQ ID NO: 1815 - DNA, 51 bp, Artificial Sequence
  Synthetic polynucleotide
gagctggacagctggattgacaagtyttgtctggatgctgatgtgtttgtg

SEQ ID NO: 1816 - DNA, 51 bp, Artificial Sequence
  Synthetic polynucleotide
gtaaactcaattgcaattgtgttacytttattatttggatgaatatcagtg

SEQ ID NO: 1817 - DNA, 51 bp, Artificial Sequence
  Synthetic polynucleotide
ttcgagcttctcagtatatttagtcrtactgttacctaaaaagaaaataag

SEQ ID NO: 1818 - DNA, 51 bp, Artificial Sequence
  Synthetic polynucleotide
cctgctgcagctcacctgcgtcagcygcgtgcgcgccgtcatgaactcgcg

SEQ ID NO: 1819 - DNA, 51 bp, Artificial Sequence
  Synthetic polynucleotide
agcaaccagggctacgtgcgccagcyctcccagggtgagccgcagtgtggg

SEQ ID NO: 1820 - DNA, 51 bp, Artificial Sequence
  Synthetic polynucleotide
ggcgcgctgagcaacgcggtcttccycaccgcgctctgcttcaccatcttc

SEQ ID NO: 1821 - DNA, 51 bp, Artificial Sequence
  Synthetic polynucleotide
cagtccatttgaatttggcttcacaytccgtaacccagatgatgtcttcag

SEQ ID NO: 1822 - DNA, 51 bp, Artificial Sequence
  Synthetic polynucleotide
caaaagaattatctttgctatgaccyggctgagctcttattaaaattgaaa

SEQ ID NO: 1823 - DNA, 51 bp, Artificial Sequence
  Synthetic polynucleotide
tgactgcgaccacatttctgggcagygtacttgccgcactggattcatggg

SEQ ID NO: 1824 - DNA, 51 bp, Artificial Sequence
  Synthetic polynucleotide
cgttctctgtgctgagacctgccagygtgtcaacggagggaagtgttacca

SEQ ID NO: 1825 - DNA, 51 bp, Artificial Sequence
  Synthetic polynucleotide
gaagcgctacgcggacgcccagctgycctgccagggccgcgggggcacgct

SEQ ID NO: 1826 - DNA, 51 bp, Artificial Sequence
  Synthetic polynucleotide
gccccagaagaacccgtgtgaacatrctgtcctttggccgcctggcagtta

SEQ ID NO: 1827 - DNA, 51 bp, Artificial Sequence
  Synthetic polynucleotide
ccttctatcataatacagagcccagrgcagagtaatggtgagaatcatggc

SEQ ID NO: 1828 - DNA, 51 bp, Artificial Sequence
  Synthetic polynucleotide
ctccttgcccaggccgcccacgtacrgacgctcgtccttcactgccagcca

SEQ ID NO: 1829 - DNA, 51 bp, Artificial Sequence
  Synthetic polynucleotide
tggcatgtacgtagtaggcatccagyggaaccacatgggcagcgtgttagc

SEQ ID NO: 1830 - DNA, 51 bp, Artificial Sequence
  Synthetic polynucleotide
tcaacagtactgcctgggggctgccycgcctgtgacaaccatgccctccag

SEQ ID NO: 1831 - DNA, 51 bp, Artificial Sequence
  Synthetic polynucleotide
agggcccaggtcagaatgaggacctrccggccaggtgagaagggcacgtgc

SEQ ID NO: 1832 - DNA, 51 bp, Artificial Sequence
  Synthetic polynucleotide
attgcagtccatgtagtcagagtgcygacctgcatcatgagtgactccccc

SEQ ID NO: 1833 - DNA, 51 bp, Artificial Sequence
  Synthetic polynucleotide
gctggcagctcggccccgccgccgcyattaccccggccagggcctggggct

SEQ ID NO: 1834 - DNA, 51 bp, Artificial Sequence
  Synthetic polynucleotide
gcttaccgcccccctcccttccagaytgtggatccgctggcccggggccgg

SEQ ID NO: 1835 - DNA, 51 bp, Artificial Sequence
  Synthetic polynucleotide
ggctctgtggatggacggcacctgcygcggaccctgtcccgagcgaagttc

SEQ ID NO: 1836 - DNA, 51 bp, Artificial Sequence
  Synthetic polynucleotide
gaaaatgaaggaactgaagaaaattygcaagtatgtcttagggttcagtaa

SEQ ID NO: 1837 - DNA, 51 bp, Artificial Sequence
  Synthetic polynucleotide
ttgtttcctcagtctataccaaaacycacctttcctggtggtttactaatt

SEQ ID NO: 1838 - DNA, 51 bp, Artificial Sequence
  Synthetic polynucleotide
ctcatcgagtacctcatccaccgctycctgttccacatgaagccccccagc

SEQ ID NO: 1839 - DNA, 51 bp, Artificial Sequence
  Synthetic polynucleotide
aaaataaacattccatttgatgaatyaaagaattatttgtctgaagcaaca

SEQ ID NO: 1840 - DNA, 51 bp, Artificial Sequence
  Synthetic polynucleotide
tcggctcagaaacactaaatacaaayctgctccggctgctgaaaagaaagt

SEQ ID NO: 1841 - DNA, 51 bp, Artificial Sequence
  Synthetic polynucleotide
agtatttggaatgaatggaagaataygggttaaggcaaaaaccatccagca

SEQ ID NO: 1842 - DNA, 51 bp, Artificial Sequence
  Synthetic polynucleotide
caggtggcccgtaagctggtcatcaytgagagcgacctggaacgtgcagag

SEQ ID NO: 1843 - DNA, 51 bp, Artificial Sequence
  Synthetic polynucleotide
gagctggaccacgctctcaacgataygacttccatgtaaacgttcatccac

SEQ ID NO: 1844 - DNA, 51 bp, Artificial Sequence
  Synthetic polynucleotide
ggagtacagtgcaatgagggaccagyacatgaggactggggagggctttct

SEQ ID NO: 1845 - DNA, 51 bp, Artificial Sequence
  Synthetic polynucleotide
tttttctttgttttttaaggaacacygtccattggcatggggaaatataaa

SEQ ID NO: 1846 - DNA, 51 bp, Artificial Sequence
  Synthetic polynucleotide
tgaatctatcagtttgcttgagttaygtcgaaatacgaacagaaaacaagc

SEQ ID NO: 1847 - DNA, 51 bp, Artificial Sequence
  Synthetic polynucleotide
attaagtcagatgcggccatgactgycgctgtaaagatgctcaagcgtaag

SEQ ID NO: 1848 - DNA, 51 bp, Artificial Sequence
  Synthetic polynucleotide
cgcgcgctgtcgcccgcagatttctycgccaagcgcaagagatcagcgcct

SEQ ID NO: 1849 - DNA, 51 bp, Artificial Sequence
  Synthetic polynucleotide
agactattggctggccacatggacaycggagtacagtataaacaatactgg

SEQ ID NO: 1850 - DNA, 51 bp, Artificial Sequence
  Synthetic polynucleotide
atgcctggtcagcttaatgtgctgcyggctgaggctggtgtgccatatgac

SEQ ID NO: 1851 - DNA, 51 bp, Artificial Sequence
  Synthetic polynucleotide
gtgctgctgcggcggtgccagcagcygcaggagcacctgggcctggccgag

SEQ ID NO: 1852 - DNA, 51 bp, Artificial Sequence
  Synthetic polynucleotide
gatgggttttatttccagacttcacytctaatggtgattatgggagaactg

SEQ ID NO: 1853 - DNA, 51 bp, Artificial Sequence
  Synthetic polynucleotide
  misc_feature (26)..(26): n is a, c, g, t or u
cactagcaacctcaaacagacaccanggtgcatctgactcctgaggagaag

SEQ ID NO: 1854 - DNA, 51 bp, Artificial Sequence
  Synthetic polynucleotide
ccttgagcatctggattctgcctaahaaaaaacatttattttcattgcaat

SEQ ID NO: 1855 - DNA, 51 bp, Artificial Sequence
  Synthetic polynucleotide
  misc_feature (26)..(26): n is a, c, g, t or u
agttggtggtgaggccctgggcaggntggtatcaaggttacaagacaggtt

SEQ ID NO: 1856 - DNA, 51 bp, Artificial Sequence
  Synthetic polynucleotide
accacatatgcacacatatctccagygatcccctgggctccagagaaccta

SEQ ID NO: 1857 - DNA, 51 bp, Artificial Sequence
  Synthetic polynucleotide
gctgtggttggggcctgccaggcccygggtctccgggatgtccacctcgcc

SEQ ID NO: 1858 - DNA, 51 bp, Artificial Sequence
  Synthetic polynucleotide
ccgccatcgtaggcaggcggctcccvctgtactgtgcaggagtcctctccc

SEQ ID NO: 1859 - DNA, 51 bp, Artificial Sequence
  Synthetic polynucleotide
gaggagcgggcggtgaaggacgagcygctgggcgagaagcccgagatcaag

SEQ ID NO: 1860 - DNA, 51 bp, Artificial Sequence
  Synthetic polynucleotide
cctcctccagcgctagtcctgctgaygggcaaagaaggtgtccacggtggt

SEQ ID NO: 1861 - DNA, 51 bp, Artificial Sequence
  Synthetic polynucleotide
cttgcaggtgcccatcagaagcgacygatccccatcaagtacaaggcaatg

SEQ ID NO: 1862 - DNA, 51 bp, Artificial Sequence
  Synthetic polynucleotide
gccagtgatgacaagactgttaagcygtgggacaagagcagccgggaatgt

SEQ ID NO: 1863 - DNA, 51 bp, Artificial Sequence
  Synthetic polynucleotide
cccccgaaactccttgaccctgcccyccatccccgcaggcatcagcaacat

SEQ ID NO: 1864 - DNA, 51 bp, Artificial Sequence
  Synthetic polynucleotide
ctcctccgcctaggtccctgccatcycactggcgtacgaggctgccgaaag

SEQ ID NO: 1865 - DNA, 51 bp, Artificial Sequence
  Synthetic polynucleotide
gagaaacactgcagaagctaagacayaggaattctacagcatgatatttca

SEQ ID NO: 1866 - DNA, 51 bp, Artificial Sequence
  Synthetic polynucleotide
acacttaatgattgttggcaagaaaygtgctgctgatctgggcctgaataa

SEQ ID NO: 1867 - DNA, 51 bp, Artificial Sequence
  Synthetic polynucleotide
ttccacccctggtcggatgtaacgcygccactcatgtcggtccctgagatc

SEQ ID NO: 1868 - DNA, 51 bp, Artificial Sequence
  Synthetic polynucleotide
ctcccgtcaccacccagtaaggtcaygtgcttccacccctggtcggatgta

SEQ ID NO: 1869 - DNA, 51 bp, Artificial Sequence
  Synthetic polynucleotide
atggagtacagccgccaggagctacycaggaaggtgggagagagccaagcc

SEQ ID NO: 1870 - DNA, 51 bp, Artificial Sequence
  Synthetic polynucleotide
gcctgaccccagaagaatttgtgagbgtatccatatgtatctccctaatga

SEQ ID NO: 1871 - DNA, 51 bp, Artificial Sequence
  Synthetic polynucleotide
ctactcatgttgttatgaaaacaggyataccaagaacctttacagaatacc

SEQ ID NO: 1872 - DNA, 51 bp, Artificial Sequence
  Synthetic polynucleotide
ggtttctttcagcatgattttgaagbcagaggagatgtggtcaatggaaga

SEQ ID NO: 1873 - DNA, 51 bp, Artificial Sequence
  Synthetic polynucleotide
tgaagccctgttgaggggagaacttrccacaaagccacagcccagggacac

SEQ ID NO: 1874 - DNA, 51 bp, Artificial Sequence
  Synthetic polynucleotide
gaggagaattctgtcccctaccaggygtccctgaattctggctaccacttc

SEQ ID NO: 1875 - DNA, 51 bp, Artificial Sequence
  Synthetic polynucleotide
gattttcttctctttatctgctgcayggggaggcctgatcactctctcttc

SEQ ID NO: 1876 - DNA, 51 bp, Artificial Sequence
  Synthetic polynucleotide
ttctccagccaagtagcccagggcayggccttcctcgcttccaagaatgtg

SEQ ID NO: 1877 - DNA, 51 bp, Artificial Sequence
  Synthetic polynucleotide
tatggcatcctcctctgggagatctyctcacttggtgagccactgggccca

SEQ ID NO: 1878 - DNA, 51 bp, Artificial Sequence
  Synthetic polynucleotide
ctggtgaacagcaagttctataaacbggtgaaggatggataccaaatggcc

SEQ ID NO: 1879 - DNA, 51 bp, Artificial Sequence
  Synthetic polynucleotide
atttttcagattgttcagtttggcabgaatgaaaaggttgggcaaatctcc

SEQ ID NO: 1880 - DNA, 51 bp, Artificial Sequence
  Synthetic polynucleotide
gtaagtggaaagattattgccacccygcacatcaagtatcctaaggacagg

SEQ ID NO: 1881 - DNA, 51 bp, Artificial Sequence
  Synthetic polynucleotide
gcggagggctgtgtccccggcgcttycggggggcctcagggcgcggaggac

SEQ ID NO: 1882 - DNA, 51 bp, Artificial Sequence
  Synthetic polynucleotide
tatgagcatccatccatcctgagtcygaaccctctggctctcatcagccgc

SEQ ID NO: 1883 - DNA, 51 bp, Artificial Sequence
  Synthetic polynucleotide
tttcctggtttacagggtcctccagyaagttataaaatttgggattatgat

SEQ ID NO: 1884 - DNA, 51 bp, Artificial Sequence
  Synthetic polynucleotide
caggcagcagaagatgtcgttttcaytggacctgacacacatgctattcaa

SEQ ID NO: 1885 - DNA, 51 bp, Artificial Sequence
  Synthetic polynucleotide
acacgtgcccgaatctgctgtgaccyggatgtcttggccagcaagaaggta

SEQ ID NO: 1886 - DNA, 51 bp, Artificial Sequence
  Synthetic polynucleotide
cataaggagcgccccacagtcatgcygtttccctttaggaatctcggctca

SEQ ID NO: 1887 - DNA, 51 bp, Artificial Sequence
  Synthetic polynucleotide
taaggagcgccccacagtcatgctgyttccctttaggaatctcggctcacc

SEQ ID NO: 1888 - DNA, 51 bp, Artificial Sequence
  Synthetic polynucleotide
tcaatgcctgtagctattgcattaaygaccacagcggtcatctctacctgc

SEQ ID NO: 1889 - DNA, 51 bp, Artificial Sequence
  Synthetic polynucleotide
aagctgatgatcaagcagggccttcyggacaagcatgggaagcccacagac

SEQ ID NO: 1890 - DNA, 51 bp, Artificial Sequence
  Synthetic polynucleotide
caggaaaaagagaaaaaatcagtggyaagtccctcttttatgtgtactctc

SEQ ID NO: 1891 - DNA, 51 bp, Artificial Sequence
  Synthetic polynucleotide
gaatacctggaagcaattcaccatcyccatgaggagtggctcatcaaaggc

SEQ ID NO: 1892 - DNA, 51 bp, Artificial Sequence
  Synthetic polynucleotide
atcgaagggctgtcccagaagtttayttacctaaatgatgatgtcatgttt

SEQ ID NO: 1893 - DNA, 51 bp, Artificial Sequence
  Synthetic polynucleotide
tttgccttctcttatttttattatcycatgagtgcagtgcagccactgaat

SEQ ID NO: 1894 - DNA, 51 bp, Artificial Sequence
  Synthetic polynucleotide
ccgccatcctctcaggtttcacgcaygtgtgctgcagctcccatttcatca

SEQ ID NO: 1895 - DNA, 51 bp, Artificial Sequence
  Synthetic polynucleotide
tacaactgcagctgcaataaactggyccttatacctgttgggttctaaccc

SEQ ID NO: 1896 - DNA, 51 bp, Artificial Sequence
  Synthetic polynucleotide
tgctcaaagtaatgatgattccgagyatgtccgtgcagtttataggtaaat

SEQ ID NO: 1897 - DNA, 51 bp, Artificial Sequence
  Synthetic polynucleotide
gccaagcccaaccagataagcctcaycaacatggacctgcccatggtgagt

SEQ ID NO: 1898 - DNA, 51 bp, Artificial Sequence
  Synthetic polynucleotide
ctcggccgcaagattctggccgccaycattatgaaaaaagactctgaggac

SEQ ID NO: 1899 - DNA, 51 bp, Artificial Sequence
  Synthetic polynucleotide
atcgaagagtatttgaccaaagagcygctggccctggattcagtggacccc

SEQ ID NO: 1900 - DNA, 51 bp, Artificial Sequence
  Synthetic polynucleotide
ttttatgtcacgaggcctagaaatcygtctgaacagtcaagtcctcctggt

SEQ ID NO: 1901 - DNA, 51 bp, Artificial Sequence
  Synthetic polynucleotide
ttggggctgagtcctgaagaggccayggagctgctgcagggtcagggccca

SEQ ID NO: 1902 - DNA, 51 bp, Artificial Sequence
  Synthetic polynucleotide
aacctgtgttgtggtttacactggayatggaaatagagaggagcaaaatct

SEQ ID NO: 1903 - DNA, 51 bp, Artificial Sequence
  Synthetic polynucleotide
aggaggaattgtcttaagtgtagaaycaatgaaaagacttaacagccttct

SEQ ID NO: 1904 - DNA, 51 bp, Artificial Sequence
  Synthetic polynucleotide
ttagcactggcctttgtgctggcacyggcatgctgtgcctcgaatgtcact

SEQ ID NO: 1905 - DNA, 51 bp, Artificial Sequence
  Synthetic polynucleotide
gctcactgcaggtccttggcagggcygggcggcctctctctgctgggcgtg

SEQ ID NO: 1906 - DNA, 51 bp, Artificial Sequence
  Synthetic polynucleotide
tcggagctgaagatcatgagtcaccytgggccccacctgaacgtggtcaac

SEQ ID NO: 1907 - DNA, 51 bp, Artificial Sequence
  Synthetic polynucleotide
caacagctatgaagacgccaaggccyacgggttcaagaacaagctgatcat

SEQ ID NO: 1908 - DNA, 51 bp, Artificial Sequence
  Synthetic polynucleotide
actatagatcattttaattgcatttrtaagtgtaggaatagcatccatcat

SEQ ID NO: 1909 - DNA, 51 bp, Artificial Sequence
  Synthetic polynucleotide
gtccagtacctgtaccgagagttgcyggttcaccttgacgatccagagagg

SEQ ID NO: 1910 - DNA, 51 bp, Artificial Sequence
  Synthetic polynucleotide
gaggggaacctcactttcaacgactytgtggacatgttttccgtgctctgc

SEQ ID NO: 1911 - DNA, 51 bp, Artificial Sequence
  Synthetic polynucleotide
acagacttcaacactgacaacttcayctgcaaggaggacctggagctgacg

SEQ ID NO: 1912 - DNA, 51 bp, Artificial Sequence
  Synthetic polynucleotide
ttagttgttacttcttcacacaagayggcggctcccagggaggaggcatga

SEQ ID NO: 1913 - DNA, 51 bp, Artificial Sequence
  Synthetic polynucleotide
ggagccgagctggtcgactcggtccyggatgtggtgaggaaggagtcagag

SEQ ID NO: 1914 - DNA, 51 bp, Artificial Sequence
  Synthetic polynucleotide
gtggctggcgtcagaaacaggctgcycaaggtgactcttgttcccttcttg

SEQ ID NO: 1915 - DNA, 51 bp, Artificial Sequence
  Synthetic polynucleotide
ttgaacttgagaacattcctccggcytcaaccccacagcaatgggaaagtg

SEQ ID NO: 1916 - DNA, 51 bp, Artificial Sequence
  Synthetic polynucleotide
gtggcatcacactcctcaagccaggyatcccgggggtaggtgggccaggct

SEQ ID NO: 1917 - DNA, 51 bp, Artificial Sequence
  Synthetic polynucleotide
aagcaggccctgaccagctgtggctytgactgcttggaaaccagcatcggt

SEQ ID NO: 1918 - DNA, 51 bp, Artificial Sequence
  Synthetic polynucleotide
acagcagctgacatggaggcccgccyggcgtgcggcctggtaaagggccac

SEQ ID NO: 1919 - DNA, 51 bp, Artificial Sequence
  Synthetic polynucleotide
gccgtcttccagctggtctacaattyctacctgtccggggtgctgctggtg

SEQ ID NO: 1920 - DNA, 51 bp, Artificial Sequence
  Synthetic polynucleotide
atgatcctctacgacatccctgatayccgtctcttctggtgtgaggacgag

SEQ ID NO: 1921 - DNA, 51 bp, Artificial Sequence
  Synthetic polynucleotide
gcctgcgctttctgcagcggaacggygcgcggacccgggcgggagagggcg

SEQ ID NO: 1922 - DNA, 51 bp, Artificial Sequence
  Synthetic polynucleotide
tatgaggaactcccaggcactgataycaggtgagagccagggtccgggcag

SEQ ID NO: 1923 - DNA, 51 bp, Artificial Sequence
  Synthetic polynucleotide
tgcagggaaggtcattaaaggttggygatgaaacatgacccactttccttg

SEQ ID NO: 1924 - DNA, 51 bp, Artificial Sequence
  Synthetic polynucleotide
ttcacacttctagtaagcctctaccygcacgacaacacataatgacccacc

SEQ ID NO: 1925 - DNA, 51 bp, Artificial Sequence
  Synthetic polynucleotide
gtagttgatgctgatgtaacagttayaggttctggtcctggaggatatgtt

SEQ ID NO: 1926 - DNA, 51 bp, Artificial Sequence
  Synthetic polynucleotide
agaggagactctcaccactagcgtcyggattggaatcgtgagtcaaatctg

SEQ ID NO: 1927 - DNA, 51 bp, Artificial Sequence
  Synthetic polynucleotide
tgccattacagtgctctacttcctcbctcggagaattccccttcctagaag

SEQ ID NO: 1928 - DNA, 51 bp, Artificial Sequence
  Synthetic polynucleotide
ggacaaagaattggatctggatcatytggaacagtctacaagggaaagtgg

SEQ ID NO: 1929 - DNA, 51 bp, Artificial Sequence
  Synthetic polynucleotide
ttaggtgatgtggcagtgaaaatgtygaatgtgacagcacctacacctcag

SEQ ID NO: 1930 - DNA, 51 bp, Artificial Sequence
  Synthetic polynucleotide
gattgagccctgtggacacctcatgygcacatcctgtcttacatcctggca

SEQ ID NO: 1931 - DNA, 51 bp, Artificial Sequence
  Synthetic polynucleotide
ctatgacctgtatggaggggagaaabttgccactttggctgagttggtcca

SEQ ID NO: 1932 - DNA, 51 bp, Artificial Sequence
  Synthetic polynucleotide
aaatagatataaaaacatcctgcccbgtaagtatcaatattccgctcagta

SEQ ID NO: 1933 - DNA, 51 bp, Artificial Sequence
  Synthetic polynucleotide
aggttccctctcccagaggcagaggycgacatccacacctaatgtccacat

SEQ ID NO: 1934 - DNA, 51 bp, Artificial Sequence
  Synthetic polynucleotide
agtccttaacaagcattgagatatayttctccatgaaggcttaacagtgaa

SEQ ID NO: 1935 - DNA, 51 bp, Artificial Sequence
  Synthetic polynucleotide
ggccatatagaagatacagtagaaabgacagatgaaggcagtccccatcca

SEQ ID NO: 1936 - DNA, 51 bp, Artificial Sequence
  Synthetic polynucleotide
atatctttacagtaccggagtacacyggaaaggatgcttgatgtaacaatg

SEQ ID NO: 1937 - DNA, 51 bp, Artificial Sequence
  Synthetic polynucleotide
tcggcactgggtagagcaccacttcyatgattttgaaagagatgcatatct

SEQ ID NO: 1938 - DNA, 51 bp, Artificial Sequence
  Synthetic polynucleotide
caactctccgtacatcgtgggcttcyatggtgcgttctacagcgatggcga

SEQ ID NO: 1939 - DNA, 51 bp, Artificial Sequence
  Synthetic polynucleotide
tttcaagccaaccccatggcctccaygactttttcaaaaaggtattagaaa

SEQ ID NO: 1940 - DNA, 51 bp, Artificial Sequence
  Synthetic polynucleotide
gtggcttgctgctgtgggaacatccygtgccactgcttcaacaaatacagg

SEQ ID NO: 1941 - DNA, 51 bp, Artificial Sequence
  Synthetic polynucleotide
gcagtgctgtccccggcccaggccaycgtggtttacaccgacagggaggtc

SEQ ID NO: 1942 - DNA, 51 bp, Artificial Sequence
  Synthetic polynucleotide
ccctcattcctcatagatcttccacyatgccaagggacaaccctacattga

SEQ ID NO: 1943 - DNA, 51 bp, Artificial Sequence
  Synthetic polynucleotide
cactatgccaagggacaaccctacahtgacgaggtggggaccttcaaagag

SEQ ID NO: 1944 - DNA, 51 bp, Artificial Sequence
  Synthetic polynucleotide
tacctcatgttcaccatggtgcttgycaccttctccatcgtcaccagcgtg

SEQ ID NO: 1945 - DNA, 51 bp, Artificial Sequence
  Synthetic polynucleotide
cggggtatactggatacactcaaggyatcggatttaggcgtatctgtgtca

SEQ ID NO: 1946 - DNA, 51 bp, Artificial Sequence
  Synthetic polynucleotide
aagatgtggctatgaatattcacttyctgttttctttccagaaagtggttt

SEQ ID NO: 1947 - DNA, 51 bp, Artificial Sequence
  Synthetic polynucleotide
gccccaccctgtgacaggtctcctgygtcatctggatgatgcatgcatcag

SEQ ID NO: 1948 - DNA, 51 bp, Artificial Sequence
  Synthetic polynucleotide
tctggataagattggaggcttcacaygtctgtgcatgccaggtaaatgggc

SEQ ID NO: 1949 - DNA, 51 bp, Artificial Sequence
  Synthetic polynucleotide
ccccgctgcccttctaggacagtgaygaagtcaggccctgagatcgtgaag

SEQ ID NO: 1950 - DNA, 51 bp, Artificial Sequence
  Synthetic polynucleotide
aaagaaaaacatattgaccgagaatytgtggtgatgttttctgtggtggat

SEQ ID NO: 1951 - DNA, 51 bp, Artificial Sequence
  Synthetic polynucleotide
gtgactaggatttaccattcccacabtgatgctccaaaagatattgcctca

SEQ ID NO: 1952 - DNA, 51 bp, Artificial Sequence
  Synthetic polynucleotide
caggaggagtcccaggccgcccgcaygatccacagcaccaatggcctatac

SEQ ID NO: 1953 - DNA, 51 bp, Artificial Sequence
  Synthetic polynucleotide
ttcgggggccttatcgtcgtctgtcytttcctgggcctttgcgatggcttc

SEQ ID NO: 1954 - DNA, 51 bp, Artificial Sequence
  Synthetic polynucleotide
ccgtgggaagcatgttagacactacyacattgccgctgaggaaatcatctg

SEQ ID NO: 1955 - DNA, 51 bp, Artificial Sequence
  Synthetic polynucleotide
cgggcttgtgcaccagggcatgaaahgctcctgtgagtgacctgggccttg

SEQ ID NO: 1956 - DNA, 51 bp, Artificial Sequence
  Synthetic polynucleotide
gacccctgcagctgcagacatctgcytcaccaaggagctacactcccactt

SEQ ID NO: 1957 - DNA, 51 bp, Artificial Sequence
  Synthetic polynucleotide
cagtctcctttgtgacaatggacaaygtagaaatactcctggaagttttgt

SEQ ID NO: 1958 - DNA, 51 bp, Artificial Sequence
  Synthetic polynucleotide
ctttctggctgtagaccttgatgagygctctgagaacctgaatctctgtgg

SEQ ID NO: 1959 - DNA, 51 bp, Artificial Sequence
  Synthetic polynucleotide
gtagcacggagctctttgtgaaaggygggcctgggacctgaggatgtggga

SEQ ID NO: 1960 - DNA, 51 bp, Artificial Sequence
  Synthetic polynucleotide
gacgcggaagtagtagccattgccartgatgagctctggcaccacgcagtg

SEQ ID NO: 1961 - DNA, 51 bp, Artificial Sequence
  Synthetic polynucleotide
cctcctatcagccttccgccgcacgygagtggccatcctcagggcctgggg

SEQ ID NO: 1962 - DNA, 51 bp, Artificial Sequence
  Synthetic polynucleotide
accaagcagccacgccagtacttcayaggagtcctggacatcgctggcttc

SEQ ID NO: 1963 - DNA, 51 bp, Artificial Sequence
  Synthetic polynucleotide
atgcaccagctgcgctgcaatggtgygctggagggcatccgcatctgcagg

SEQ ID NO: 1964 - DNA, 51 bp, Artificial Sequence
  Synthetic polynucleotide
aagagtgcagaaagagagaaggagayggcctccatgaaggaggagttcaca

SEQ ID NO: 1965 - DNA, 51 bp, Artificial Sequence
  Synthetic polynucleotide
gaaagagagaaggagatggcctccahgaaggaggagttcacacgcctcaaa

SEQ ID NO: 1966 - DNA, 51 bp, Artificial Sequence
  Synthetic polynucleotide
cagtactttgctgttattgcagccaytggggaccgcagcaagaaggaccag

SEQ ID NO: 1967 - DNA, 51 bp, Artificial Sequence
  Synthetic polynucleotide
acaggaaagttggcatctgcagacayagagacctgtgagtgccatgaatct

SEQ ID NO: 1968 - DNA, 51 bp, Artificial Sequence
  Synthetic polynucleotide
ctcctgccccacgtgcagcgcttccygcagtcccgaaagcactgcccactc

SEQ ID NO: 1969 - DNA, 51 bp, Artificial Sequence
  Synthetic polynucleotide
ggagagcctggccaagtgctgcaggyagcggccgcgcgggcctgcgtagag

SEQ ID NO: 1970 - DNA, 51 bp, Artificial Sequence
  Synthetic polynucleotide
tcgctgtcctctggctcgcaggtcabggcagcgccaggcggcaggtcggag

SEQ ID NO: 1971 - DNA, 51 bp, Artificial Sequence
  Synthetic polynucleotide
aatggagttctctctattatctatgyaagtgttgcttcttgctccagggat

SEQ ID NO: 1972 - DNA, 51 bp, Artificial Sequence
  Synthetic polynucleotide
ctgaaagagcgatgcctccaggttgyccggagcctagtcaagcctgagaat

SEQ ID NO: 1973 - DNA, 51 bp, Artificial Sequence
  Synthetic polynucleotide
agagagtgggtgtctccggaggccaygggctacccggaggtggagcgcagg

SEQ ID NO: 1974 - DNA, 51 bp, Artificial Sequence
  Synthetic polynucleotide
ctgttgaagagttgagtgcagcacgyaagagtctttttttttttttttaat

SEQ ID NO: 1975 - DNA, 51 bp, Artificial Sequence
  Synthetic polynucleotide
ttgcggacacttttggcgatcaaggrcagatacatccttataacaatggaa

SEQ ID NO: 1976 - DNA, 51 bp, Artificial Sequence
  Synthetic polynucleotide
attgatggttgggagggaaaagacabtggacagtgttgtaatgaatttata

SEQ ID NO: 1977 - DNA, 51 bp, Artificial Sequence
  Synthetic polynucleotide
gtataagaaggagctggagaagactyattctgccaaggtgcttgctctcga

SEQ ID NO: 1978 - DNA, 51 bp, Artificial Sequence
  Synthetic polynucleotide
tcttgaagatacaattgtcttaaacyggagaaaacctatacaatcaaatgg

SEQ ID NO: 1979 - DNA, 51 bp, Artificial Sequence
  Synthetic polynucleotide
cgacacaacaagccagccatatagaygcctctgctcccaggagagcttcac

SEQ ID NO: 1980 - DNA, 51 bp, Artificial Sequence
  Synthetic polynucleotide
gtcgaggacgtacaacaggagcaggyaaatacttatcttcaaatgcatatg

SEQ ID NO: 1981 - DNA, 51 bp, Artificial Sequence
  Synthetic polynucleotide
ctgggctgtacaaacatggtatgacyctcttggagcaataaacaaaataca

SEQ ID NO: 1982 - DNA, 51 bp, Artificial Sequence
  Synthetic polynucleotide
cccttcgtggcccgccagatggcccygcacgcaaatgtgagtgggggtggg

SEQ ID NO: 1983 - DNA, 51 bp, Artificial Sequence
  Synthetic polynucleotide
cctcatccaccgctgtgccagccagygcgtcgtggccttgtccatctgcag

SEQ ID NO: 1984 - DNA, 51 bp, Artificial Sequence
  Synthetic polynucleotide
ggacatgatggctcgatacgtcttcyccaacttcacggctgtcccgaagag

SEQ ID NO: 1985 - DNA, 51 bp, Artificial Sequence
  Synthetic polynucleotide
gccgccctgctcatctggaaactccycatcaccatccacgaccgaaaagaa

SEQ ID NO: 1986 - DNA, 51 bp, Artificial Sequence
  Synthetic polynucleotide
agatgatctgggatggaattgtaggyaagagaaaaggtgtctgctgttgtt

SEQ ID NO: 1987 - DNA, 51 bp, Artificial Sequence
  Synthetic polynucleotide
ccttttagcttgtagtgaacaggacyctgagccaggggcccggcttacctg

SEQ ID NO: 1988 - DNA, 51 bp, Artificial Sequence
  Synthetic polynucleotide
ctagccctccatacctgggagcagayggggctgaggtcactgtgcgcccaa

SEQ ID NO: 1989 - DNA, 51 bp, Artificial Sequence
  Synthetic polynucleotide
atgcctatatgaacttttctggttcyaatggatgtctgctgggctctttta

SEQ ID NO: 1990 - DNA, 51 bp, Artificial Sequence
  Synthetic polynucleotide
gcgtggcagggcctgggcgaggtgcygcaggcccagggccagaacgaggct

SEQ ID NO: 1991 - DNA, 51 bp, Artificial Sequence
  Synthetic polynucleotide
tacagctatgatttgtcccactcacytcaatataatctcactgtcttgcga

SEQ ID NO: 1992 - DNA, 51 bp, Artificial Sequence
  Synthetic polynucleotide
attggaggaatatcgtaggtaaaaabgcctattggatccaaagagaggcca

SEQ ID NO: 1993 - DNA, 51 bp, Artificial Sequence
  Synthetic polynucleotide
tagataaattcaaattagacttaggyaagtaatgcaatatggtagactggg

SEQ ID NO: 1994 - DNA, 51 bp, Artificial Sequence
  Synthetic polynucleotide
ttaagacacgctgcaacaaagcagghattgacaaattttatataactttat

SEQ ID NO: 1995 - DNA, 51 bp, Artificial Sequence
  Synthetic polynucleotide
agatgcctaagcccagaaagggtgcytcttcaactaaaatacaggcaagtt

SEQ ID NO: 1996 - DNA, 51 bp, Artificial Sequence
  Synthetic polynucleotide
tgcttctctgtctttgccatctccthctttgcgctcccagcggtaggtgcc

SEQ ID NO: 1997 - DNA, 51 bp, Artificial Sequence
  Synthetic polynucleotide
cttctctccaggctggaccagtccabtgggaagccctcactgttcatctcc

SEQ ID NO: 1998 - DNA, 51 bp, Artificial Sequence
  Synthetic polynucleotide
ggctgccgcagcaagtacgtgggccyctgggggcggctgcgctttgcccgg

SEQ ID NO: 1999 - DNA, 51 bp, Artificial Sequence
  Synthetic polynucleotide
cctccggaaaatattcaccaccatcycattctgcattgttctgcgcatggc

SEQ ID NO: 2000 - DNA, 51 bp, Artificial Sequence
  Synthetic polynucleotide
ttaaagaaagctgacaaaatattaaytttgcatgaaggtagcagctatttt

SEQ ID NO: 2001 - DNA, 51 bp, Artificial Sequence
  Synthetic polynucleotide
tacgtgggagtagccgacactttgcytgctatgggattcttcagaggtcta

SEQ ID NO: 2002 - DNA, 51 bp, Artificial Sequence
  Synthetic polynucleotide
ggacggcagccttactttgaaactcygttccacaaagctctgaatttacat

SEQ ID NO: 2003 - DNA, 51 bp, Artificial Sequence
  Synthetic polynucleotide
  misc_feature (26)..(26): n is a, c, g, t or u
gatcaaggaacctgtctccacaaagngtgaccacatattttgcaagtaagt

SEQ ID NO: 2004 - DNA, 51 bp, Artificial Sequence
  Synthetic polynucleotide
gaaagggccttcacagtgtcctttabgtaagaatgatataaccaaaaggta

SEQ ID NO: 2005 - DNA, 51 bp, Artificial Sequence
  Synthetic polynucleotide
atgtaagaatgatataaccaaaaggyatataatttggtaatgatgctaggt

SEQ ID NO: 2006 - DNA, 51 bp, Artificial Sequence
  Synthetic polynucleotide
taaagttcattggaacagaaagaaabggatttatctgctcttcgcgttgaa

SEQ ID NO: 2007 - DNA, 51 bp, Artificial Sequence
  Synthetic polynucleotide
cagaacaaagcacatcagaaaaaggbgtgtattgttggccaaacactgata

SEQ ID NO: 2008 - DNA, 51 bp, Artificial Sequence
  Synthetic polynucleotide
ctcttcttccagatcttcagggggcyagaaatctgttgctatgggcccttc

SEQ ID NO: 2009 - DNA, 51 bp, Artificial Sequence
  Synthetic polynucleotide
gtcattaatgctatgcagaaaatctyagagtgtcccatctggtaagtcagc

SEQ ID NO: 2010 - DNA, 51 bp, Artificial Sequence
  Synthetic polynucleotide
atgcttgctatacagactgctatacyggacattttaaatgcatgtctaaag

SEQ ID NO: 2011 - DNA, 51 bp, Artificial Sequence
  Synthetic polynucleotide
tgctatactggacattttaaatgcaygtctaaaggaactaaaatgccataa

SEQ ID NO: 2012 - DNA, 51 bp, Artificial Sequence
  Synthetic polynucleotide
ggcgtgctggtgctcacagtgctgcygccgccagaggagctactgcgttcc

SEQ ID NO: 2013 - DNA, 51 bp, Artificial Sequence
  Synthetic polynucleotide
ggaaattttctcaagtggcaaacttyagaaggaggtgttttacaggtaagc

SEQ ID NO: 2014 - DNA, 51 bp, Artificial Sequence
  Synthetic polynucleotide
gtctaaaaaagcagaaagtccagagyatgtccatatgtatactcaaagaag

SEQ ID NO: 2015 - DNA, 51 bp, Artificial Sequence
  Synthetic polynucleotide
gcgcttctcacactcgggctcgtacycgcagcacatgaatcacaggtattc

SEQ ID NO: 2016 - DNA, 51 bp, Artificial Sequence
  Synthetic polynucleotide
cccctctgctacttcgcccgggtctytgacgtcttcctggtggagggctac

SEQ ID NO: 2017 - DNA, 51 bp, Artificial Sequence
  Synthetic polynucleotide
gtgggagccctgaaggagaagtaccygcggccgtccccgctgctcttccac

SEQ ID NO: 2018 - DNA, 51 bp, Artificial Sequence
  Synthetic polynucleotide
agcttctgggggaaagctcatcttcyatgatcttcgaggagagggggtgaa

SEQ ID NO: 2019 - DNA, 51 bp, Artificial Sequence
  Synthetic polynucleotide
ctcatcttctcccacctgcacgagcyctcactgcgctggcacctggggcgc

SEQ ID NO: 2020 - DNA, 51 bp, Artificial Sequence
  Synthetic polynucleotide
cccctgttttctgcacaccccaagcycttcgagagaacctgtcgccagtat

SEQ ID NO: 2021 - DNA, 51 bp, Artificial Sequence
  Synthetic polynucleotide
cgggcccctctcagcaggctgtgtgygccagggctgtggggcagaggacgt

SEQ ID NO: 2022 - DNA, 51 bp, Artificial Sequence
  Synthetic polynucleotide
atcacccacattgccatccaggcctygagagaggagtgtctctccaggtga

SEQ ID NO: 2023 - DNA, 51 bp, Artificial Sequence
  Synthetic polynucleotide
ctaccatctctccccgcaggaatccygtactatgtctacatggggctgctg

SEQ ID NO: 2024 - DNA, 51 bp, Artificial Sequence
  Synthetic polynucleotide
ccataaaattcttcttagtagctatyaccttcttattatttgatctagaaa

SEQ ID NO: 2025 - DNA, 51 bp, Artificial Sequence
  Synthetic polynucleotide
tcccttcccctactcatcgcactaayttacactcacaacaccctaggctca

SEQ ID NO: 2026 - DNA, 51 bp, Artificial Sequence
  Synthetic polynucleotide
atccttcttgctcatcagttgatgayacgcccgagcagatgccaacacagc

SEQ ID NO: 2027 - DNA, 51 bp, Artificial Sequence
  Synthetic polynucleotide
attcagcttcctacactattaaagtytaccacaaccaccaccccatcatac

SEQ ID NO: 2028 - DNA, 51 bp, Artificial Sequence
  Synthetic polynucleotide
  misc_feature (26)..(26): n is a, c, g, t or u
acccagcagtgggggctcgcggacgngaagggccactggtccccaacaatg

SEQ ID NO: 2029 - DNA, 51 bp, Artificial Sequence
  Synthetic polynucleotide
gtagccaagaagattgctgctgtacytacggtaaatgtatattttaactgt

SEQ ID NO: 2030 - DNA, 51 bp, Artificial Sequence
  Synthetic polynucleotide
tgagtttttgtctcttcccagtttcyctgagaaggtaaggcctgttgtgac

SEQ ID NO: 2031 - DNA, 51 bp, Artificial Sequence
  Synthetic polynucleotide
tctggcaccattcagagatacagtcyacctaatgttggtttgattcaaaaa

SEQ ID NO: 2032 - DNA, 51 bp, Artificial Sequence
  Synthetic polynucleotide
gcagatgcgccgatcgtggcccaccyttgggaggtgagttttcacactttt

SEQ ID NO: 2033 - DNA, 51 bp, Artificial Sequence
  Synthetic polynucleotide
gacgaagattcaccttatcaaaatayaaaaattctacactcgaagcagttt

SEQ ID NO: 2034 - DNA, 51 bp, Artificial Sequence
  Synthetic polynucleotide
aagtggatggccccagagagcatctytgactgtgtctacacggttcagagc

SEQ ID NO: 2035 - DNA, 51 bp, Artificial Sequence
  Synthetic polynucleotide
tccttcctccaacccttccaggagcygcgtgagaccaagcgccgtcatgag

SEQ ID NO: 2036 - DNA, 51 bp, Artificial Sequence
  Synthetic polynucleotide
ccaccctccaacctctcccaggtgcygttctggggcctacgggacctaaag

SEQ ID NO: 2037 - DNA, 51 bp, Artificial Sequence
  Synthetic polynucleotide
tacagggtggtcttcgacatcacctycttcttcttcgtcatcgtcatcctg

SEQ ID NO: 2038 - DNA, 51 bp, Artificial Sequence
  Synthetic polynucleotide
gccggcaagggtgaggccctgcggayccgcgccatcctccgctcccttgtg

SEQ ID NO: 2039 - DNA, 51 bp, Artificial Sequence
  Synthetic polynucleotide
gaagtgtcagccgtgctctactaccyggaccaggtgggtggggccggaggg

SEQ ID NO: 2040 - DNA, 51 bp, Artificial Sequence
  Synthetic polynucleotide
ttttacaccctgcggttccttgcccycttcttggcatttgccatcaacttc

SEQ ID NO: 2041 - DNA, 51 bp, Artificial Sequence
  Synthetic polynucleotide
cccgccctgcggtgtctgagcctccygcatacactggtggcctttctctgc

SEQ ID NO: 2042 - DNA, 51 bp, Artificial Sequence
  Synthetic polynucleotide
gtgtgcccacagtccttcctgtaccygggctggtatatggtgatgtccctc

SEQ ID NO: 2043 - DNA, 51 bp, Artificial Sequence
  Synthetic polynucleotide
ctcagggcttagcagcaggttgtacrgggcgatccacacttgcccgtccaa

SEQ ID NO: 2044 - DNA, 51 bp, Artificial Sequence
  Synthetic polynucleotide
aaaatacctcgaagcaatcaaaataytttctggtccattgaaaggaataga

SEQ ID NO: 2045 - DNA, 51 bp, Artificial Sequence
  Synthetic polynucleotide
cctgcgggtcaccatcctcacgtacygtacaaaaggacagcagaggagaag

SEQ ID NO: 2046 - DNA, 51 bp, Artificial Sequence
  Synthetic polynucleotide
tccccagaaaagatggaaaagaaatygcatgcagtgccggctgccaagaca

SEQ ID NO: 2047 - DNA, 51 bp, Artificial Sequence
  Synthetic polynucleotide
ccatattatcgtcattatactggtgyactgtttcccattgctcatcatggg

SEQ ID NO: 2048 - DNA, 51 bp, Artificial Sequence
  Synthetic polynucleotide
taccaggacctgctcaatgtcaagchggccctggacatcgagatcgccacc

SEQ ID NO: 2049 - DNA, 51 bp, Artificial Sequence
  Synthetic polynucleotide
gacctgctcaatgtcaagctggcccyggacatcgagatcgccacctacagg

SEQ ID NO: 2050 - DNA, 51 bp, Artificial Sequence
  Synthetic polynucleotide
ggccctggacatcgagatcgccaccyacaggaagctgctagagggcgagga

SEQ ID NO: 2051 - DNA, 51 bp, Artificial Sequence
  Synthetic polynucleotide
cgggccagtgagcgggcagagatgayggagctcaatgaccgctttgccagc

SEQ ID NO: 2052 - DNA, 51 bp, Artificial Sequence
  Synthetic polynucleotide
ggagctcaatgaccgctttgccagcyacatcgagaaggttcgcttcctgga

SEQ ID NO: 2053 - DNA, 51 bp, Artificial Sequence
  Synthetic polynucleotide
agctacatcgagaaggttcgcttccyggaacagcaaaacaaggcgctggct

SEQ ID NO: 2054 - DNA, 51 bp, Artificial Sequence
  Synthetic polynucleotide
ttcctggaacagcaaaacaaggcgcyggctgctgagctgaaccagctgcgg

SEQ ID NO: 2055 - DNA, 51 bp, Artificial Sequence
  Synthetic polynucleotide
caaaacaaggcgctggctgctgagcygaaccagctgcgggccaaggagccc

SEQ ID NO: 2056 - DNA, 51 bp, Artificial Sequence
  Synthetic polynucleotide
gccaagccagacctcaccgcagcccygaaagagatccgcacgcagtatgag

SEQ ID NO: 2057 - DNA, 51 bp, Artificial Sequence
  Synthetic polynucleotide
ccgcacgcagtatgaggcaatggcgyccagcaacatgcatgaagccgaaga

SEQ ID NO: 2058 - DNA, 51 bp, Artificial Sequence
  Synthetic polynucleotide
agttatcaggaggcgctggcgcggcyggaggaagaggggcagagcctcaag

SEQ ID NO: 2059 - DNA, 51 bp, Artificial Sequence
  Synthetic polynucleotide
gagatcgccacctaccgcaagctgcbggagggtgaggagtgcaggtgggta

SEQ ID NO: 2060 - DNA, 51 bp, Artificial Sequence
  Synthetic polynucleotide
cagatcaagaccctcaacaacaagtbtgcctccttcatcgacaaggtgagc

SEQ ID NO: 2061 - DNA, 51 bp, Artificial Sequence
  Synthetic polynucleotide
aatgagaagatcaccatgcagaaccycaacgaccgcctggcttcctacctg

SEQ ID NO: 2062 - DNA, 51 bp, Artificial Sequence
  Synthetic polynucleotide
ccatgtccccaccaggaagtggccaygcgcaagctggtgcgctcagtgact

SEQ ID NO: 2063 - DNA, 51 bp, Artificial Sequence
  Synthetic polynucleotide
tccccctgcccgacctcagaccgcabggaggtgctatgctgccgagaaccc

SEQ ID NO: 2064 - DNA, 51 bp, Artificial Sequence
  Synthetic polynucleotide
ctggtccgccggctgccgcagcaagbacgtgggcctctgggggcggctgcg

SEQ ID NO: 2065 - DNA, 51 bp, Artificial Sequence
  Synthetic polynucleotide
gaccgccagggaggcacctggaggchcctgggctccgtggtcttcatccac

SEQ ID NO: 2066 - DNA, 51 bp, Artificial Sequence
  Synthetic polynucleotide
aacgctcgggtggagaactgcgccgbcatctactgcaacgacggcttctgc

SEQ ID NO: 2067 - DNA, 51 bp, Artificial Sequence
  Synthetic polynucleotide
gagtacggcgcggccgtgctgttctygctcatgtgcacctttgcgctcatc

SEQ ID NO: 2068 - DNA, 51 bp, Artificial Sequence
  Synthetic polynucleotide
  misc_feature (26)..(26): n is a, c, g, t or u
tggctgcacaacctgggcgaccaganaggcaaaccctacaacagcagcggc

SEQ ID NO: 2069 - DNA, 51 bp, Artificial Sequence
  Synthetic polynucleotide
cttcagcagcctcaccagtgtgggchtcggcaacgtctctcccaacaccaa

SEQ ID NO: 2070 - DNA, 51 bp, Artificial Sequence
  Synthetic polynucleotide
tggcctccagggaagaatgacatctbtggggagcctctgaacctgtatgca

SEQ ID NO: 2071 - DNA, 51 bp, Artificial Sequence
  Synthetic polynucleotide
gctgccgcgcagatcgcgcaggcacbgctgggcgccgaggagcgcaaagtg

SEQ ID NO: 2072 - DNA, 51 bp, Artificial Sequence
  Synthetic polynucleotide
aagaacgaggatggggctgtcatcabgttcatcctcaatttcgaggtggtg

SEQ ID NO: 2073 - DNA, 51 bp, Artificial Sequence
  Synthetic polynucleotide
gcccccctaggccgtaagttcatcabcgccaacgctcgggtggagaactgc

SEQ ID NO: 2074 - DNA, 51 bp, Artificial Sequence
  Synthetic polynucleotide
caagcggaccacctgggatttctgcygtggtctcctgcggcagcggcctca

SEQ ID NO: 2075 - DNA, 51 bp, Artificial Sequence
  Synthetic polynucleotide
tgccgcccagggccagctgcccagcygcattgccaccccctactccccgcc

SEQ ID NO: 2076 - DNA, 51 bp, Artificial Sequence
  Synthetic polynucleotide
ttgtctgcaggccttcgaggacatcyacctagaggagcggaagaccatcaa

SEQ ID NO: 2077 - DNA, 51 bp, Artificial Sequence
  Synthetic polynucleotide
tgccgacaagatgttcacatatgtcytcgtgctggagatgctgctcaagtg

SEQ ID NO: 2078 - DNA, 51 bp, Artificial Sequence
  Synthetic polynucleotide
tttattggtgtcatcattgacaactbcaaccaacagaagaaaaagatacgt

SEQ ID NO: 2079 - DNA, 51 bp, Artificial Sequence
  Synthetic polynucleotide
cgcacgctgctctttgccctcatgabgtccctgcctgccctcttcaacatc

SEQ ID NO: 2080 - DNA, 51 bp, Artificial Sequence
  Synthetic polynucleotide
tttgccgatgccctgtctgagccacyccgtatcgccaagcccaaccagata

SEQ ID NO: 2081 - DNA, 51 bp, Artificial Sequence
  Synthetic polynucleotide
gagatggacgccctgaagatccagahggaggagaagttcatggcagccaac

SEQ ID NO: 2082 - DNA, 51 bp, Artificial Sequence
  Synthetic polynucleotide
agatacacaactgaatttgtggacchgggcaatgtctcagccttacgcacc

SEQ ID NO: 2083 - DNA, 51 bp, Artificial Sequence
  Synthetic polynucleotide
ttacacagagaaggccaagctattayttttgtcattgatagtagtgataga

SEQ ID NO: 2084 - DNA, 51 bp, Artificial Sequence
  Synthetic polynucleotide
tcccgaggcggctgctccggtctctygcggtgtggaaagggaacgacctac

SEQ ID NO: 2085 - DNA, 51 bp, Artificial Sequence
  Synthetic polynucleotide
gaattaattacagggctcgtccaacyggtccctcagtcacacatgccagag

SEQ ID NO: 2086 - DNA, 51 bp, Artificial Sequence
  Synthetic polynucleotide
cttcagaaaagagtgatggcactgcbgaggcgcattgagcatcccactgca

SEQ ID NO: 2087 - DNA, 51 bp, Artificial Sequence
  Synthetic polynucleotide
cctcaccagaatcacccaggacattytccagcagttgctgaaacgaggttt

SEQ ID NO: 2088 - DNA, 51 bp, Artificial Sequence
  Synthetic polynucleotide
ttctatgtctggtttgatgccactaytggctatctgtccatcacagccaac

SEQ ID NO: 2089 - DNA, 51 bp, Artificial Sequence
  Synthetic polynucleotide
gttcattgtgctatttactggagagygtgtactgaaactcatctctctacg

SEQ ID NO: 2090 - DNA, 51 bp, Artificial Sequence
  Synthetic polynucleotide
tgagacctttggcaacagcatgatcygcctattccaaattacaacctctgc

SEQ ID NO: 2091 - DNA, 51 bp, Artificial Sequence
  Synthetic polynucleotide
caacctgaggaataaatgtatacaayggcctcccaccaatgcttccttgga

SEQ ID NO: 2092 - DNA, 51 bp, Artificial Sequence
  Synthetic polynucleotide
tgttgtgttcctgtcttacagacttytatagtattgaataaagggaaggcc

SEQ ID NO: 2093 - DNA, 51 bp, Artificial Sequence
  Synthetic polynucleotide
tgtgttcctgtcttacagacttttayagtattgaataaagggaaggccatc

SEQ ID NO: 2094 - DNA, 51 bp, Artificial Sequence
  Synthetic polynucleotide
tatttcaccaatgcctggtgttggcyggacttcttaattgttgatgtaggt

SEQ ID NO: 2095 - DNA, 51 bp, Artificial Sequence
  Synthetic polynucleotide
ccaaacaaactccagctcattgccayggatttgcccatggtgagtggtgac

SEQ ID NO: 2096 - DNA, 51 bp, Artificial Sequence
  Synthetic polynucleotide
agattttactttccttcgggatccayggaactggctcgatttcactgtcat

SEQ ID NO: 2097 - DNA, 51 bp, Artificial Sequence
  Synthetic polynucleotide
atagaccgcaccaacgccaacttccyggtgtggccgccctgtgtggaggtg

SEQ ID NO: 2098 - DNA, 51 bp, Artificial Sequence
  Synthetic polynucleotide
ttgcagggaccgtcagtggcgactaygggcagagtgggctattggaccctg

SEQ ID NO: 2099 - DNA, 51 bp, Artificial Sequence
  Synthetic polynucleotide
ctccccatcgctgcacttggactgcdgctcctgcacctgcgcctccagctt

SEQ ID NO: 2100 - DNA, 51 bp, Artificial Sequence
  Synthetic polynucleotide
ctcaacctcttcattgccttactgcycaattcctttagcaatgaggaaaga

SEQ ID NO: 2101 - DNA, 51 bp, Artificial Sequence
  Synthetic polynucleotide
ggagtcagggttgctgggttgaggargagggcttctagggagggggccttg

SEQ ID NO: 2102 - DNA, 51 bp, Artificial Sequence
  Synthetic polynucleotide
cttattggagtcagtgaactggggcyggtattcatgaaaggcaactgggcc

SEQ ID NO: 2103 - DNA, 51 bp, Artificial Sequence
  Synthetic polynucleotide
gaatcagtcactacgattatttcggyaactaactaactataatggaattat

SEQ ID NO: 2104 - DNA, 51 bp, Artificial Sequence
  Synthetic polynucleotide
gcttcttcctaggagccagcaccgcyctttgaccttgccatgcttgcctta

SEQ ID NO: 2105 - DNA, 51 bp, Artificial Sequence
  Synthetic polynucleotide
ctgcagcttgctaacctgcctgatchatacaaagtctttgagaggtgttaa

SEQ ID NO: 2106 - DNA, 51 bp, Artificial Sequence
  Synthetic polynucleotide
acagaaagaagatctggatattgtaygtgaaaggttcactactagtaaact

SEQ ID NO: 2107 - DNA, 51 bp, Artificial Sequence
  Synthetic polynucleotide
ggcaatcaagggacccagatcacggyaagaatggtacatgggagagtaaat

SEQ ID NO: 2108 - DNA, 51 bp, Artificial Sequence
  Synthetic polynucleotide
agccttcaaaatgaatggttacatabccaatgcaaactactcagtgaagaa

SEQ ID NO: 2109 - DNA, 51 bp, Artificial Sequence
  Synthetic polynucleotide
gcatcttcttactcttcatcaaccghaagttaaaaagaaccacatgggaaa

SEQ ID NO: 2110 - DNA, 51 bp, Artificial Sequence
  Synthetic polynucleotide
ttgttggcagtttttgtgactcctcytactgatcttcgttctgacttctcc

SEQ ID NO: 2111 - DNA, 51 bp, Artificial Sequence
  Synthetic polynucleotide
aacagatgttccacatcattactggyaaaaaacctggtttttgggctttgt

SEQ ID NO: 2112 - DNA, 51 bp, Artificial Sequence
  Synthetic polynucleotide
ggcccaaattgggtgttttgtgccaygtgagtcagcagaagtgtccattgt

SEQ ID NO: 2113 - DNA, 51 bp, Artificial Sequence
  Synthetic polynucleotide
cctgataatgatcagttctccaatcbtgaggctctcctcatccagattgga

SEQ ID NO: 2114 - DNA, 51 bp, Artificial Sequence
  Synthetic polynucleotide
cctcatccagattggaccaaaggaaygtgttttacccggaggagagactgc

SEQ ID NO: 2115 - DNA, 51 bp, Artificial Sequence
  Synthetic polynucleotide
ttggatattgcagcagtcagagcccbtaacctttttcaggtaaaaaaaaaa

SEQ ID NO: 2116 - DNA, 51 bp, Artificial Sequence
  Synthetic polynucleotide
aaagtgtgaccacatattttgcaagbaagtttgaatgtgttatgtggctcc

SEQ ID NO: 2117 - DNA, 51 bp, Artificial Sequence
  Synthetic polynucleotide
tatgaggaagacatcctgactgtacytggggttcttttaagtgatacccaa

SEQ ID NO: 2118 - DNA, 51 bp, Artificial Sequence
  Synthetic polynucleotide
aggggtgaatgttcctgaaattcctygtatcccaatgctaaggcaccttta

SEQ ID NO: 2119 - DNA, 51 bp, Artificial Sequence
  Synthetic polynucleotide
acatcgaatagatggatcacaaaacytcaatgaaacgtgggagaactacaa

SEQ ID NO: 2120 - DNA, 51 bp, Artificial Sequence
  Synthetic polynucleotide
ctctcatagcggagctgatactgccrcataaaatcagcttgctcaaattct

SEQ ID NO: 2121 - DNA, 51 bp, Artificial Sequence
  Synthetic polynucleotide
ttcttctagtatccagtccccctaaytagaagagcctgggaacttggttta

SEQ ID NO: 2122 - DNA, 51 bp, Artificial Sequence
  Synthetic polynucleotide
ttcctgtcacagttacagtaaaaggyagagataatgttccaaaaaggatga

SEQ ID NO: 2123 - DNA, 51 bp, Artificial Sequence
  Synthetic polynucleotide
gaagcatcccccagcagcctggctgrgtgtaacacatttttaatctttgag

SEQ ID NO: 2124 - DNA, 51 bp, Artificial Sequence
  Synthetic polynucleotide
gctcctttattcatgtctaatgaccyccgacacatcagccctcaagccaaa

SEQ ID NO: 2125 - DNA, 51 bp, Artificial Sequence
  Synthetic polynucleotide
gtgctggatgttcccgagggcacctygcctgacaaacagagcactgagcaa

SEQ ID NO: 2126 - DNA, 51 bp, Artificial Sequence
  Synthetic polynucleotide
tctgacttaaccataggtgctgtcayggattcatccagaaaataagacggt

SEQ ID NO: 2127 - DNA, 51 bp, Artificial Sequence
  Synthetic polynucleotide
gagtacaatcacatttttccacttcytgaaaagtactgtggcttccatgaa

SEQ ID NO: 2128 - DNA, 51 bp, Artificial Sequence
  Synthetic polynucleotide
ttcttctccgctcctccgacccaggyaggttgttacagatgtcttgagaag

SEQ ID NO: 2129 - DNA, 51 bp, Artificial Sequence
  Synthetic polynucleotide
agagatggctcgctggagctcatggygagtgggtcagagccccatccgagc

SEQ ID NO: 2130 - DNA, 51 bp, Artificial Sequence
  Synthetic polynucleotide
ctggctgattacctcacgctccagghtggtttatttatttgtcttacaaaa

SEQ ID NO: 2131 - DNA, 51 bp, Artificial Sequence
  Synthetic polynucleotide
ttcaccgctccattggtcttgagccragtgggtgatgtccaggggctggca

SEQ ID NO: 2132 - DNA, 51 bp, Artificial Sequence
  Synthetic polynucleotide
cgcctcaacagccacatgaatgcccyccacctggggtcacaggccaaccgc

SEQ ID NO: 2133 - DNA, 51 bp, Artificial Sequence
  Synthetic polynucleotide
caccgatgcacccatgatgatgaatrtgtgtgtatccgactgatggaaggc

SEQ ID NO: 2134 - DNA, 51 bp, Artificial Sequence
  Synthetic polynucleotide
gggtatctctctttgcttcaagttgyaagtgaacactattttctctgaata

SEQ ID NO: 2135 - DNA, 51 bp, Artificial Sequence
  Synthetic polynucleotide
cagaaagagaagtatctcccgaaggygaggaaatggaaatgtaatacacgc

SEQ ID NO: 2136 - DNA, 51 bp, Artificial Sequence
  Synthetic polynucleotide
gaggtcagctttgcggggaaaatggyaaggagcaagggagcaggagggttc

SEQ ID NO: 2137 - DNA, 51 bp, Artificial Sequence
  Synthetic polynucleotide
ccctggtggaacagatggtgaatggyaattacacgagttgatttagataat

SEQ ID NO: 2138 - DNA, 51 bp, Artificial Sequence
  Synthetic polynucleotide
acccgcatccaggatctctacactgygagtaagctggaagtggattgcctc

SEQ ID NO: 2139 - DNA, 51 bp, Artificial Sequence
  Synthetic polynucleotide
aagccaatcccaggaggaaaaacggyaagaagcagcccgaaccaaactttt

SEQ ID NO: 2140 - DNA, 51 bp, Artificial Sequence
  Synthetic polynucleotide
acaagggctggaactggacttcaggygagggctggggtgggcaggaatgga

SEQ ID NO: 2141 - DNA, 51 bp, Artificial Sequence
  Synthetic polynucleotide
cctgttctgtatttagcggaagaagyccctatagaaccatacaacatccca

SEQ ID NO: 2142 - DNA, 51 bp, Artificial Sequence
  Synthetic polynucleotide
tactgcatcatacagacacttgaggracttgatttctttgtccagtgagtc

SEQ ID NO: 2143 - DNA, 51 bp, Artificial Sequence
  Synthetic polynucleotide
gacattcaggatgaaaaccagctgcyggtggccgacgtgaagcggctggga

SEQ ID NO: 2144 - DNA, 51 bp, Artificial Sequence
  Synthetic polynucleotide
ctctgcagacgtggcgtgctgcaccyccaccagagccatggcatcgacgac

SEQ ID NO: 2145 - DNA, 51 bp, Artificial Sequence
  Synthetic polynucleotide
ctgatgaatttcagcacgtcctggcrcactgggctgtgggaggtctgtgag

SEQ ID NO: 2146 - DNA, 51 bp, Artificial Sequence
  Synthetic polynucleotide
gcgcgtggcatagtaatgagcgatcrgcagcatcgtcttgaactcctcatg

SEQ ID NO: 2147 - DNA, 51 bp, Artificial Sequence
  Synthetic polynucleotide
accgggaagatcaagagagctgttcygcagttcactcctgctagctggacc

SEQ ID NO: 2148 - DNA, 51 bp, Artificial Sequence
  Synthetic polynucleotide
ggaccccaaggagtccatcaagcagygtgagctgctcctggaggaaccaga

SEQ ID NO: 2149 - DNA, 51 bp, Artificial Sequence
  Synthetic polynucleotide
gaaaacagaaagtggacaatcatggyaagcaagaaacaaggaatggaggat

SEQ ID NO: 2150 - DNA, 51 bp, Artificial Sequence
  Synthetic polynucleotide
gttgtgtcatcaggctgtcatggtgyccctgctgacagattactcacctca

SEQ ID NO: 2151 - DNA, 51 bp, Artificial Sequence
  Synthetic polynucleotide
tgtcatcaggctgtcatggtgtcccygctgacagattactcacctcagctc

SEQ ID NO: 2152 - DNA, 51 bp, Artificial Sequence
  Synthetic polynucleotide
tgtcatggtgtccctgctgacagatbactcacctcagctccagaagcctaa

SEQ ID NO: 2153 - DNA, 51 bp, Artificial Sequence
  Synthetic polynucleotide
cgtgaccttctcactctaaaaaactytaccggagaagaaattaaatatatg

SEQ ID NO: 2154 - DNA, 51 bp, Artificial Sequence
  Synthetic polynucleotide
ctaaaaaactttaccggagaagaaabtaaatatatgctatggctatcagca

SEQ ID NO: 2155 - DNA, 51 bp, Artificial Sequence
  Synthetic polynucleotide
tttaccggagaagaaattaaatataygctatggctatcagcagatctgaaa

SEQ ID NO: 2156 - DNA, 51 bp, Artificial Sequence
  Synthetic polynucleotide
tatatgctatggctatcagcagatcygaaatttaggataaaacagaaagga

SEQ ID NO: 2157 - DNA, 51 bp, Artificial Sequence
  Synthetic polynucleotide
gtccttgatttatagtatttgccttyattgcaagggaagtccttaggcatg

SEQ ID NO: 2158 - DNA, 51 bp, Artificial Sequence
  Synthetic polynucleotide
gagaaaagaagtactcgaacaagatygtctacagaaacaggtaagtccact

SEQ ID NO: 2159 - DNA, 51 bp, Artificial Sequence
  Synthetic polynucleotide
cgtcctttacacaattaaaagaagaygctgtttaatctgaggatcctgtta

SEQ ID NO: 2160 - DNA, 51 bp, Artificial Sequence
  Synthetic polynucleotide
tgaaagtctcacggacacggcccggyttgtaaatattttcttctctccaaa

SEQ ID NO: 2161 - DNA, 51 bp, Artificial Sequence
  Synthetic polynucleotide
tttttcttggtttgccacagtgtatygtctagcatggcagatgcagtattg

SEQ ID NO: 2162 - DNA, 51 bp, Artificial Sequence
  Synthetic polynucleotide
tttcttggtttgccacagtgtattgyctagcatggcagatgcagtattggc

SEQ ID NO: 2163 - DNA, 51 bp, Artificial Sequence
  Synthetic polynucleotide
ttgtctagcatggcagatgcagtatyggctcgagtgtataaacaatcagat

SEQ ID NO: 2164 - DNA, 51 bp, Artificial Sequence
  Synthetic polynucleotide
gctcgagtgtataaacaatcagattbggacaccctggctaaagaagcatcc

SEQ ID NO: 2165 - DNA, 51 bp, Artificial Sequence
  Synthetic polynucleotide
ctggctaaagaagcatccatcccaaytatcaatgggctgtcagatttgtac

SEQ ID NO: 2166 - DNA, 51 bp, Artificial Sequence
  Synthetic polynucleotide
  misc_feature (26)..(26): n is a, c, g, t or u
gctaaagaagcatccatcccaattancaatgggctgtcagatttgtaccat

SEQ ID NO: 2167 - DNA, 51 bp, Artificial Sequence
  Synthetic polynucleotide
atccatcccaattatcaatgggctgycagatttgtaccatcctatccagat

SEQ ID NO: 2168 - DNA, 51 bp, Artificial Sequence
  Synthetic polynucleotide
ccatcctatccagatcctggctgatyacctcacgctccaggttggtttatt

SEQ ID NO: 2169 - DNA, 51 bp, Artificial Sequence
  Synthetic polynucleotide
cagatcctggctgattacctcacgcyccaggttggtttatttatttgtctt

SEQ ID NO: 2170 - DNA, 51 bp, Artificial Sequence
  Synthetic polynucleotide
ctctctgaaaggtcttaccctcagcbggatcggggatgggaacaatatcct

SEQ ID NO: 2171 - DNA, 51 bp, Artificial Sequence
  Synthetic polynucleotide
tggatcggggatgggaacaatatccygcactccatcatgatgagcgcagcg

SEQ ID NO: 2172 - DNA, 51 bp, Artificial Sequence
  Synthetic polynucleotide
caccttcaggcagctactccaaaggyagggaaactttttgccttgaaacta

SEQ ID NO: 2173 - DNA, 51 bp, Artificial Sequence
  Synthetic polynucleotide
gaagcagcgcatggaggcaatgtatyaattacagacacttggataagcatg

SEQ ID NO: 2174 - DNA, 51 bp, Artificial Sequence
  Synthetic polynucleotide
aggcaatgtattaattacagacactyggataagcatgggacaagaagagga

SEQ ID NO: 2175 - DNA, 51 bp, Artificial Sequence
  Synthetic polynucleotide
ttaattacagacacttggataagcaygggacaagaagaggagaagaaaaag

SEQ ID NO: 2176 - DNA, 51 bp, Artificial Sequence
  Synthetic polynucleotide
tgcctctgactggacatttttacacbgcttgcccagaaagccagaagaagt

SEQ ID NO: 2177 - DNA, 51 bp, Artificial Sequence
  Synthetic polynucleotide
ccagaagaagtggatgatgaagtctyttattctcctcgatcactagtgttc

SEQ ID NO: 2178 - DNA, 51 bp, Artificial Sequence
  Synthetic polynucleotide
cctggtggacggcgtccctttcagcygctgcaatcctagctcgccacggcc

SEQ ID NO: 2179 - DNA, 51 bp, Artificial Sequence
  Synthetic polynucleotide
ccaccagacggaggagctcaacctgygggtgcgtggctgcagggctgccct

SEQ ID NO: 2180 - DNA, 51 bp, Artificial Sequence
  Synthetic polynucleotide
agagtcaataatcctttcaagaaagrtactatttcatttcctcccaacttg

SEQ ID NO: 2181 - DNA, 51 bp, Artificial Sequence
  Synthetic polynucleotide
gggttcatgggtgagtccttgggacrgtggaaagcccggccaaactcctca

SEQ ID NO: 2182 - DNA, 51 bp, Artificial Sequence
  Synthetic polynucleotide
ggccggagatgggcactctcgggtcrtatctctagacctggggcttcacgg

SEQ ID NO: 2183 - DNA, 51 bp, Artificial Sequence
  Synthetic polynucleotide
tcttttgtttccttgtaggtacatgyttataggtgggaccaattttgccta

SEQ ID NO: 2184 - DNA, 51 bp, Artificial Sequence
  Synthetic polynucleotide
ttaggagttggaccactcattgtacycagagcactagaaggactaggagag

SEQ ID NO: 2185 - DNA, 51 bp, Artificial Sequence
  Synthetic polynucleotide
cccctcaccctgtggcaagtacatgygagtgcaggcggagcaggcagggcg

SEQ ID NO: 2186 - DNA, 51 bp, Artificial Sequence
  Synthetic polynucleotide
acctccatgttcactgggtctgcctytaaccgcagcatccatcgggtcttc

SEQ ID NO: 2187 - DNA, 51 bp, Artificial Sequence
  Synthetic polynucleotide
tctgaaggatgaccagccccatgggracctacaaataagatataaagaata

SEQ ID NO: 2188 - DNA, 51 bp, Artificial Sequence
  Synthetic polynucleotide
ccatgtctcccagaggggatgaacartatagtctatgaagcccacctagtt

SEQ ID NO: 2189 - DNA, 51 bp, Artificial Sequence
  Synthetic polynucleotide
ccttctgtcctctgtgttggagcaarcatgcctaactcagaaacacataca

SEQ ID NO: 2190 - DNA, 51 bp, Artificial Sequence
  Synthetic polynucleotide
caggacttcctggggctgcagtgaghatagctgctaacatcacacaattac

SEQ ID NO: 2191 - DNA, 51 bp, Artificial Sequence
  Synthetic polynucleotide
gcacctggagctccaggaggcaaggyagtatttcaatttattctctacctt

SEQ ID NO: 2192 - DNA, 51 bp, Artificial Sequence
  Synthetic polynucleotide
cggccaggacttcctggggctgcaghgagtatagctgctaacatcacacaa

SEQ ID NO: 2193 - DNA, 51 bp, Artificial Sequence
  Synthetic polynucleotide
cgagatggatctcctggtggcaaggbataataaacacatgtgcaattgatt

SEQ ID NO: 2194 - DNA, 51 bp, Artificial Sequence
  Synthetic polynucleotide
ccagctggccagcctggagataaggyaacccttaatactacctggatataa

SEQ ID NO: 2195 - DNA, 51 bp, Artificial Sequence
  Synthetic polynucleotide
ttccccggtcctaaaggaaatgatgbgagttccttcattaatttcttcaat

SEQ ID NO: 2196 - DNA, 51 bp, Artificial Sequence
  Synthetic polynucleotide
ctggtgaacctggaagagatgtgagyagcagtttttattcaaccagccagg

SEQ ID NO: 2197 - DNA, 51 bp, Artificial Sequence
  Synthetic polynucleotide
ggacgttggccctgtttgctttttayaaaccaaactctatctgaaatccca

SEQ ID NO: 2198 - DNA, 51 bp, Artificial Sequence
  Synthetic polynucleotide
ccccctggaggttctggacctgctgyaagttccttcctctttctctgtcta

SEQ ID NO: 2199 - DNA, 51 bp, Artificial Sequence
  Synthetic polynucleotide
tatactccaactggggagttccgtgyggaccgtgaaggttctccagtgctg

SEQ ID NO: 2200 - DNA, 51 bp, Artificial Sequence
  Synthetic polynucleotide
taacattccccagctggaagacgttyctcagttcctgcagagtaagtccac

SEQ ID NO: 2201 - DNA, 51 bp, Artificial Sequence
  Synthetic polynucleotide
ggacagaggacaatggcttccatggbaaggtgcctgcatgtacctgtgcta

SEQ ID NO: 2202 - DNA, 51 bp, Artificial Sequence
  Synthetic polynucleotide
ataccacttctcagcttgtgcaaacrgctgtcgcagaagtaacacattggt

SEQ ID NO: 2203 - DNA, 51 bp, Artificial Sequence
  Synthetic polynucleotide
cgccagccacagccctggtgcctggyggcacacaatggtgaccgctacgac

SEQ ID NO: 2204 - DNA, 51 bp, Artificial Sequence
  Synthetic polynucleotide
tttgtgttgataagctctacggtgtraagagttgcgagtgtggaacatgtc

SEQ ID NO: 2205 - DNA, 51 bp, Artificial Sequence
  Synthetic polynucleotide
cagatcaccgaccaggtgtccctgcyacgcctcacctggagcgagctgttc

SEQ ID NO: 2206 - DNA, 51 bp, Artificial Sequence
  Synthetic polynucleotide
tgcctatatatatttaaagatactcrctactatgcttccttctgggagttt

SEQ ID NO: 2207 - DNA, 51 bp, Artificial Sequence
  Synthetic polynucleotide
aggatcagatgaagcagatggaaggyaggaaccagttttgaatgttttcca

SEQ ID NO: 2208 - DNA, 51 bp, Artificial Sequence
  Synthetic polynucleotide
catatgtctttattggcgtgcgctcytgaggttgtaatggccacatatagc

SEQ ID NO: 2209 - DNA, 51 bp, Artificial Sequence
  Synthetic polynucleotide
gctattgttaatgcagtaccctgctytgctttggatggacaatggattcta

SEQ ID NO: 2210 - DNA, 51 bp, Artificial Sequence
  Synthetic polynucleotide
tcggtcagcggcggggtggtgagcgrgcccgcgtaggtccagtaatcccag

SEQ ID NO: 2211 - DNA, 51 bp, Artificial Sequence
  Synthetic polynucleotide
tccctgagtcgggaggccaagccatrtaacaggatcccggtagctttgtca

SEQ ID NO: 2212 - DNA, 51 bp, Artificial Sequence
  Synthetic polynucleotide
ggcatcaagttgaccatcaacaaacycctggacatggcagcccaagtaagg

SEQ ID NO: 2213 - DNA, 51 bp, Artificial Sequence
  Synthetic polynucleotide
taccaagtcattcacataatttttcrgctgatcaacaatatctataagttg

SEQ ID NO: 2214 - DNA, 51 bp, Artificial Sequence
  Synthetic polynucleotide
tgtggcaagatcagctttgagctgaygcgggagccgtgcatcacgcccagt

SEQ ID NO: 2215 - DNA, 51 bp, Artificial Sequence
  Synthetic polynucleotide
tcagaacacttcccatcctccgcagygtaaccagctctttgagctcctgca

SEQ ID NO: 2216 - DNA, 51 bp, Artificial Sequence
  Synthetic polynucleotide
ctgaagtaccccatcgagcacggcaycgtcaccaactgggacgacatggag

SEQ ID NO: 2217 - DNA, 51 bp, Artificial Sequence
  Synthetic polynucleotide
aaccccaaggccaaccgcgagaagaygacccaggtgagtggcccgctacct

SEQ ID NO: 2218 - DNA, 51 bp, Artificial Sequence
  Synthetic polynucleotide
tacacttactgatggtcattcagcayggactgggacaggtaatactaaaaa

SEQ ID NO: 2219 - DNA, 51 bp, Artificial Sequence
  Synthetic polynucleotide
ctggagagagccaaagtaccataggyaaatacatatttactacttgggatt

SEQ ID NO: 2220 - DNA, 51 bp, Artificial Sequence
  Synthetic polynucleotide
cgaggcggatcgggtgttgcatccahggagcgagctgagagctcgaggtga

SEQ ID NO: 2221 - DNA, 51 bp, Artificial Sequence
  Synthetic polynucleotide
atgccacgtacctcttctgctgtccrgaaggaagcctgtgcctgtttatac

SEQ ID NO: 2222 - DNA, 51 bp, Artificial Sequence
  Synthetic polynucleotide
ctcgatgagaatttgaaagccatagraacagcgagcctctggaacctgcac

SEQ ID NO: 2223 - DNA, 51 bp, Artificial Sequence
  Synthetic polynucleotide
ttaaaagaaactcaagtttgtactcrccgattttcaaaacataacacgcat

SEQ ID NO: 2224 - DNA, 51 bp, Artificial Sequence
  Synthetic polynucleotide
aaacataacacgcattcattgggatragtatttccatcagtcccacagaca

SEQ ID NO: 2225 - DNA, 51 bp, Artificial Sequence
  Synthetic polynucleotide
gcggatgtagctcagcatgatgcccrgggtgaagaagccgaagaatcccag

SEQ ID NO: 2226 - DNA, 51 bp, Artificial Sequence
  Synthetic polynucleotide
cgtttgtaaagcacatctccaaaggyagcgggttccgttccttgtaataat

SEQ ID NO: 2227 - DNA, 51 bp, Artificial Sequence
  Synthetic polynucleotide
cacctgccctgtccttctgcaggacygccccattgcctgggccaacctcat

SEQ ID NO: 2228 - DNA, 51 bp, Artificial Sequence
  Synthetic polynucleotide
tacattgggttgcccttgaccctcaytgtgattgaagtcatcccgttcctg

SEQ ID NO: 2229 - DNA, 51 bp, Artificial Sequence
  Synthetic polynucleotide
gggagtgccggggccaccattcggcygtacatcgatagctatgagaaggac

SEQ ID NO: 2230 - DNA, 51 bp, Artificial Sequence
  Synthetic polynucleotide
ttggttgatcctttgggtgaaatgtyggcaccatcctgggaggaacatgcc

SEQ ID NO: 2231 - DNA, 51 bp, Artificial Sequence
  Synthetic polynucleotide
gaattacaacaatcagtcttcaaatbttggacccatgaagggaggaaattt

SEQ ID NO: 2232 - DNA, 51 bp, Artificial Sequence
  Synthetic polynucleotide
ttttggacccatgaagggaggaaatyttggaggcagaagctctggccccta

SEQ ID NO: 2233 - DNA, 51 bp, Artificial Sequence
  Synthetic polynucleotide
ggtggtgcttccctcaagcccgaatycgtggacatcatcaatgccaaacaa

SEQ ID NO: 2234 - DNA, 51 bp, Artificial Sequence
  Synthetic polynucleotide
tctgacgacattgaagctagccgaaygtaagtgtaacttggttgagactgt

SEQ ID NO: 2235 - DNA, 51 bp, Artificial Sequence
  Synthetic polynucleotide
attgaaactgcctttctcaatgcachtgtatatttgtcacctaacgtggaa

SEQ ID NO: 2236 - DNA, 51 bp, Artificial Sequence
  Synthetic polynucleotide
agtggagactggaatcccttacacaytgatcctaactttgctagtctagca

SEQ ID NO: 2237 - DNA, 51 bp, Artificial Sequence
  Synthetic polynucleotide
gtccatttgatcattgtctctggtgrgcgatataggaatattaatttggca

SEQ ID NO: 2238 - DNA, 51 bp, Artificial Sequence
  Synthetic polynucleotide
gcacctcaggcccacagaggtcctcrccgcggtaggtcagattgtccgggt

SEQ ID NO: 2239 - DNA, 51 bp, Artificial Sequence
  Synthetic polynucleotide
gccgatgaacgcgttcatggtatggyccaagatcgaacgcaggaagatcat

SEQ ID NO: 2240 - DNA, 51 bp, Artificial Sequence
  Synthetic polynucleotide
tgatgtatgtatctaattaaccttgraagtcgtaataaacgcaagagactg

SEQ ID NO: 2241 - DNA, 51 bp, Artificial Sequence
  Synthetic polynucleotide
caccagtggcaaagaatgcgctctaygtggagagtggcccaccatgcctca

SEQ ID NO: 2242 - DNA, 51 bp, Artificial Sequence
  Synthetic polynucleotide
ctgaatgcccaagtccttcagcaccrggagccctgcaccagccagcagaca

SEQ ID NO: 2243 - DNA, 51 bp, Artificial Sequence
  Synthetic polynucleotide
cgcaaaatactccttcagcggagcgragaggtggcggatgactggcacgct

SEQ ID NO: 2244 - DNA, 51 bp, Artificial Sequence
  Synthetic polynucleotide
gaggaagaccagaaggatgtacatcrtgatttctgagaccacagaggtgaa

SEQ ID NO: 2245 - DNA, 51 bp, Artificial Sequence
  Synthetic polynucleotide
ttctccatgtatgccccagccttcaygatggtggtgatcagcctggaccgc

SEQ ID NO: 2246 - DNA, 51 bp, Artificial Sequence
  Synthetic polynucleotide
gcagacgcctaccttaatgaaaccgrtatccttcgcgtactgacggaaaca

SEQ ID NO: 2247 - DNA, 51 bp, Artificial Sequence
  Synthetic polynucleotide
cagggtacagggcagcatgatgtacrgcggattgaggccgatggagcgaga

SEQ ID NO: 2248 - DNA, 51 bp, Artificial Sequence
  Synthetic polynucleotide
ttttcaagaaaatagctataataccbatgcctcagcaatacatagaactga

SEQ ID NO: 2249 - DNA, 51 bp, Artificial Sequence
  Synthetic polynucleotide
agaggacccttttcactcttggaggyaataaaaatttcatcatctactatt

SEQ ID NO: 2250 - DNA, 51 bp, Artificial Sequence
  Synthetic polynucleotide
gtgttggagcagctcaatggaagacrggatctgaaacaaagcccaagaatg

SEQ ID NO: 2251 - DNA, 51 bp, Artificial Sequence
  Synthetic polynucleotide
gtcagagcccttaacctttttcaggbaaaaaaaaaaaaaaaaaaaaaaaaa

SEQ ID NO: 2252 - DNA, 51 bp, Artificial Sequence
  Synthetic polynucleotide
gggaggggatggggcagctgcgccaygtgcaccacccttttcctgctcagc

SEQ ID NO: 2253 - DNA, 51 bp, Artificial Sequence
  Synthetic polynucleotide
agccacaaagtttttatgtggatcartatcctcggaaagaattagactgtt

SEQ ID NO: 2254 - DNA, 51 bp, Artificial Sequence
  Synthetic polynucleotide
tcctaaattgacaggtgaagtatgcygtccagatgaacagcacaatcgggt

SEQ ID NO: 2255 - DNA, 51 bp, Artificial Sequence
  Synthetic polynucleotide
gaggctcgctccctcagcacagagcycttcaaactcaagaacgcctatgag

SEQ ID NO: 2256 - DNA, 51 bp, Artificial Sequence
  Synthetic polynucleotide
gagacacgcagccgcaacgaggcccygagggtgaagaagaagatggaagga

SEQ ID NO: 2257 - DNA, 51 bp, Artificial Sequence
  Synthetic polynucleotide
gaggcccagaagcaagtcaagagccyccagagcttgttgaaggtactcacc

SEQ ID NO: 2258 - DNA, 51 bp, Artificial Sequence
  Synthetic polynucleotide
aatctcatgaagacccctctctttgyggtcatcacttgtgcaatccagatg

SEQ ID NO: 2259 - DNA, 51 bp, Artificial Sequence
  Synthetic polynucleotide
gcgcaagaggctgcggtgagccaagygagtacagcgcacctgggggggcgc

SEQ ID NO: 2260 - DNA, 51 bp, Artificial Sequence
  Synthetic polynucleotide
cctggagaaagtgaaattgaccaacyttttactattcagaaggtgctagga

SEQ ID NO: 2261 - DNA, 51 bp, Artificial Sequence
  Synthetic polynucleotide
ctcaccttctgctccgttgtggaccycatcaatcactaccgccacgagtct

SEQ ID NO: 2262 - DNA, 51 bp, Artificial Sequence
  Synthetic polynucleotide
ttcctgctctttgtgctggagaacaygctggggcttttgcggcaccgaggg

SEQ ID NO: 2263 - DNA, 51 bp, Artificial Sequence
  Synthetic polynucleotide
ccttgctgcctccagccagcgcagcrcgtgggcacctgggagctgcgagca

SEQ ID NO: 2264 - DNA, 51 bp, Artificial Sequence
  Synthetic polynucleotide
ggggcacttgtgaccggcccggcgcygtacggcctgctgacctatgtgacc

SEQ ID NO: 2265 - DNA, 51 bp, Artificial Sequence
  Synthetic polynucleotide
cgtgaggccatcaaccgggcccgacygcgggatgctggtggcttggatcta

SEQ ID NO: 2266 - DNA, 51 bp, Artificial Sequence
  Synthetic polynucleotide
ataatcctatttattacctcagaagyttttttcttcgcaggatttttctga

SEQ ID NO: 2267 - DNA, 51 bp, Artificial Sequence
  Synthetic polynucleotide
actagtcacagccctatactccctcyacatatttaccacaacacaatgggg

SEQ ID NO: 2268 - DNA, 51 bp, Artificial Sequence
  Synthetic polynucleotide
atcagctcggtccagaagctggttcygtatgagactagagctgtgagtacc

SEQ ID NO: 2269 - DNA, 51 bp, Artificial Sequence
  Synthetic polynucleotide
tcaagaaattcaaggacagtgaaggyagatatatatatatatatatatata

SEQ ID NO: 2270 - DNA, 51 bp, Artificial Sequence
  Synthetic polynucleotide
ccatctgataagattaaaaagttccycacggagtcccatgaccgacaggcc

SEQ ID NO: 2271 - DNA, 51 bp, Artificial Sequence
  Synthetic polynucleotide
atcttcatagtggttttcttcatggrataccaccgggttttccaagtggcc

SEQ ID NO: 2272 - DNA, 51 bp, Artificial Sequence
  Synthetic polynucleotide
tcgaaggagcccagcgtgttgatgcrcttgcccgcatgctcgcaggggttg

SEQ ID NO: 2273 - DNA, 51 bp, Artificial Sequence
  Synthetic polynucleotide
gatgattcagattgacacatacagtyataacaatcgtagcaataaacccat

SEQ ID NO: 2274 - DNA, 51 bp, Artificial Sequence
  Synthetic polynucleotide
cgcaggttaatccccagaggctccayggagttccctggcctggggtccctg

SEQ ID NO: 2275 - DNA, 51 bp, Artificial Sequence
  Synthetic polynucleotide
tactgtggtggctccgctcagctcaygagggcacagagcatggcctccaga

SEQ ID NO: 2276 - DNA, 51 bp, Artificial Sequence
  Synthetic polynucleotide
ggcgcgggcggcaacaagagccgccytactctctccatgtcagtggccgtg

SEQ ID NO: 2277 - DNA, 51 bp, Artificial Sequence
  Synthetic polynucleotide
ttctgggcaaaccagaatttgacttytagtaaggtaagtttaagttttaga

SEQ ID NO: 2278 - DNA, 51 bp, Artificial Sequence
  Synthetic polynucleotide
taagacctgggctcactgcatgtccyacagcaactccgcgctgaacccgct

SEQ ID NO: 2279 - DNA, 51 bp, Artificial Sequence
  Synthetic polynucleotide
aaagcttgatacgattagcagaaggyctatttcattcagcgaatgatgctt

SEQ ID NO: 2280 - DNA, 51 bp, Artificial Sequence
  Synthetic polynucleotide
gacatgtggtcggtgggctgtattcytggggagcttagcgatggacagcct

SEQ ID NO: 2281 - DNA, 51 bp, Artificial Sequence
  Synthetic polynucleotide
gagaaattctccaacaacaacgaggyattgccagcagtgcaggcggcccct

SEQ ID NO: 2282 - DNA, 51 bp, Artificial Sequence
  Synthetic polynucleotide
ttcaggatggccacgctgcccgtccrctccgcagggttggcgccgtctgtg

SEQ ID NO: 2283 - DNA, 51 bp, Artificial Sequence
  Synthetic polynucleotide
gctccggttcctgaagtacagggtgrggttgaaggcctggccccggcgaac

SEQ ID NO: 2284 - DNA, 51 bp, Artificial Sequence
  Synthetic polynucleotide
taccttcattccttcaaactgggacrgcgcacgaagaggcctcagtgctcg

SEQ ID NO: 2285 - DNA, 51 bp, Artificial Sequence
  Synthetic polynucleotide
gggctctactcagtcttcttcttcaytgtggtcattttcctgggctccttc

SEQ ID NO: 2286 - DNA, 51 bp, Artificial Sequence
  Synthetic polynucleotide
catgatcctgagactttggaagcaaytgcagaaaatgcaaaaggcttggct

SEQ ID NO: 2287 - DNA, 51 bp, Artificial Sequence
  Synthetic polynucleotide
taatgaataggttttgatggcacttyatttgactactttaatggttatgaa

SEQ ID NO: 2288 - DNA, 51 bp, Artificial Sequence
  Synthetic polynucleotide
atagacacctatggaaagatgtgggyaagaagactgcagaaatcttgacat

SEQ ID NO: 2289 - DNA, 51 bp, Artificial Sequence
  Synthetic polynucleotide
tggggtctacggacaaaaacagataytaaaaaggttagaaaaagctaaatt

SEQ ID NO: 2290 - DNA, 51 bp, Artificial Sequence
  Synthetic polynucleotide
tcaagaacatgatatcactaatttcyatatgctcaccctagacaaagtaag

SEQ ID NO: 2291 - DNA, 51 bp, Artificial Sequence
  Synthetic polynucleotide
aaaaaatatgctggattcattcatgyatgtattttaacattttataaccta

SEQ ID NO: 2292 - DNA, 51 bp, Artificial Sequence
  Synthetic polynucleotide
ggaggacggacgttactctgtggacyactccaagtttggcaacaccgtcaa

SEQ ID NO: 2293 - DNA, 51 bp, Artificial Sequence
  Synthetic polynucleotide
ctcttcatttttcgcattatgatccycgttgtggctgcaaaggaggtgtgg

SEQ ID NO: 2294 - DNA, 51 bp, Artificial Sequence
  Synthetic polynucleotide
ctttaatgtgcttttacttccggaayactcaagcaaagaaaaacttaaaga

SEQ ID NO: 2295 - DNA, 51 bp, Artificial Sequence
  Synthetic polynucleotide
gccatcttcctgcacttctccctgcycacctgcctttcctggatgggcctc

SEQ ID NO: 2296 - DNA, 51 bp, Artificial Sequence
  Synthetic polynucleotide
ccgagagcatgagcatgtggtagaaygcatttcctgggctccagaaagctc

SEQ ID NO: 2297 - DNA, 51 bp, Artificial Sequence
  Synthetic polynucleotide
gtggacagctggaaggcctcgttccyccgagctggcgtctaccccgagaag

SEQ ID NO: 2298 - DNA, 51 bp, Artificial Sequence
  Synthetic polynucleotide
ctggagaccggggttgtcaaaaaacyctacactctggatggaaaacaggta

SEQ ID NO: 2299 - DNA, 51 bp, Artificial Sequence
  Synthetic polynucleotide
tcttttgagcaagtcctcactgataycacagaagccatcaaactggagacc

SEQ ID NO: 2300 - DNA, 51 bp, Artificial Sequence
  Synthetic polynucleotide
agacaacttctttaaaaaggtggagyacaccaagaatgtcaatcccaactg

SEQ ID NO: 2301 - DNA, 51 bp, Artificial Sequence
  Synthetic polynucleotide
ttgctggctgacctgacgcgatctcygtctgacaacatcaacctgcctcag

SEQ ID NO: 2302 - DNA, 51 bp, Artificial Sequence
  Synthetic polynucleotide
tgtagcttctaccgaaccagaacctygcaggcactgagtaatgagaagaaa

SEQ ID NO: 2303 - DNA, 51 bp, Artificial Sequence
  Synthetic polynucleotide
aggtctctgaggttccaccaaaatayggaacttgattttggacactttgac

SEQ ID NO: 2304 - DNA, 51 bp, Artificial Sequence
  Synthetic polynucleotide
tcttctctaatacttgatgttcctcygggtgtgatctcgagaattgaaaaa

SEQ ID NO: 2305 - DNA, 51 bp, Artificial Sequence
  Synthetic polynucleotide
aactttctgacttaaccataggtgcygtcatggattcatccagaaaataag

SEQ ID NO: 2306 - DNA, 51 bp, Artificial Sequence
  Synthetic polynucleotide
tcataatattcatgttatgcgggaayctttaaaaaaagtgaaggacattgt

SEQ ID NO: 2307 - DNA, 51 bp, Artificial Sequence
  Synthetic polynucleotide
tgtgtgtggcaaatgtcaaaacaggyaaggaatatgagggatgaaaataca

SEQ ID NO: 2308 - DNA, 51 bp, Artificial Sequence
  Synthetic polynucleotide
gtttttgtttagttccctacagcttytgaattcaatgaacaatttttgatt

SEQ ID NO: 2309 - DNA, 51 bp, Artificial Sequence
  Synthetic polynucleotide
ctgtatagttgccgatttggtacttycttattcaactgtgaatctgctcga

SEQ ID NO: 2310 - DNA, 51 bp, Artificial Sequence
  Synthetic polynucleotide
ggttacagaaaggactgtttctttayggtcactgataaacagtaataaaga

SEQ ID NO: 2311 - DNA, 51 bp, Artificial Sequence
  Synthetic polynucleotide
tctcttcttttcttcagggaaagagyatgccaagggagacagccgatacat

SEQ ID NO: 2312 - DNA, 51 bp, Artificial Sequence
  Synthetic polynucleotide
gagcctgcctgtgccacaggccgccygatcttcgacaacctaaagaagtcc

SEQ ID NO: 2313 - DNA, 51 bp, Artificial Sequence
  Synthetic polynucleotide
gtggccctgtctcacatcgctgggcyctgcaatcgcgctgtcttcaagggt

SEQ ID NO: 2314 - DNA, 51 bp, Artificial Sequence
  Synthetic polynucleotide
gaaccgcatgacagtcgcccacatgyggtttgacaaccagatccacgaggc

SEQ ID NO: 2315 - DNA, 51 bp, Artificial Sequence
  Synthetic polynucleotide
atctgctcagataagacagggacccycactcagaaccgcatgacagtcgcc

SEQ ID NO: 2316 - DNA, 51 bp, Artificial Sequence
  Synthetic polynucleotide
ctttctgtccttcatttcaggtcccygtgctgctggagttgtgggaatcaa

SEQ ID NO: 2317 - DNA, 51 bp, Artificial Sequence
  Synthetic polynucleotide
gttcactgcatcttctttttctgaargccatgcactaaaaaggcactgcaa

SEQ ID NO: 2318 - DNA, 51 bp, Artificial Sequence
  Synthetic polynucleotide
cagcaactaccccagctctgagaccyttgaggagatccagttttttaatgg

SEQ ID NO: 2319 - DNA, 51 bp, Artificial Sequence
  Synthetic polynucleotide
ggtgtcacagcctccgttcattatcrtacattcatcaatatctgtgaaaac

SEQ ID NO: 2320 - DNA, 51 bp, Artificial Sequence
  Synthetic polynucleotide
accttccaaactgaagcgctcctacycctccccagatataacccaggctat

SEQ ID NO: 2321 - DNA, 51 bp, Artificial Sequence
  Synthetic polynucleotide
cctctttctgagggaaaggacaagaygaagtggaaggcgcttttcaccgcg

SEQ ID NO: 2322 - DNA, 51 bp, Artificial Sequence
  Synthetic polynucleotide
aaatccattcgtttccgtcccacgcyggtcttcagggatcaccacgctcac

SEQ ID NO: 2323 - DNA, 51 bp, Artificial Sequence
  Synthetic polynucleotide
acccacagacccaccttccagcagayctgctccttccttcaggagcaggcc

SEQ ID NO: 2324 - DNA, 51 bp, Artificial Sequence
  Synthetic polynucleotide
cttggcctttgcagggctgaatcccyaccctggcatcctggtgaacagcaa

SEQ ID NO: 2325 - DNA, 51 bp, Artificial Sequence
  Synthetic polynucleotide
gtgaagtggatggccccagagagcayctttgactgtgtctacacggttcag

SEQ ID NO: 2326 - DNA, 51 bp, Artificial Sequence
  Synthetic polynucleotide
tggggactgtcatcccaggcccgccygcctgtgaagtggatggccccagag

SEQ ID NO: 2327 - DNA, 51 bp, Artificial Sequence
  Synthetic polynucleotide
gaacatcgtcaaccttctgggagccygtacccatggaggtaagggccttgg

SEQ ID NO: 2328 - DNA, 51 bp, Artificial Sequence
  Synthetic polynucleotide
aagtgggagttcccccggaacaaccygcagtttggtgagatggcagctcat

SEQ ID NO: 2329 - DNA, 51 bp, Artificial Sequence
  Synthetic polynucleotide
aattcccaggagcacctggatcttcyccagcaggtgagcctaaacaccaca

SEQ ID NO: 2330 - DNA, 51 bp, Artificial Sequence
  Synthetic polynucleotide
agcagcggtaggcccgggccccaccrtgactcttcagtgacagtttttctt

SEQ ID NO: 2331 - DNA, 51 bp, Artificial Sequence
  Synthetic polynucleotide
  misc_feature (26)..(26): n is a, c, g, t or u
ggcaactccagcccccgaacccaggngagttgtctctgctttgtctccaaa

SEQ ID NO: 2332 - DNA, 51 bp, Artificial Sequence
  Synthetic polynucleotide
agaaaccccctgtgcaccctgtgccyggaggagcgcaggcacccaacagcc

SEQ ID NO: 2333 - DNA, 51 bp, Artificial Sequence
  Synthetic polynucleotide
tcgggaccacccgaacccgcggccayggccccggccgccgccagccccccg

SEQ ID NO: 2334 - DNA, 51 bp, Artificial Sequence
  Synthetic polynucleotide
aatgcttctacaacatcagtagcatraaggaagtttcttgtttgaagccct

SEQ ID NO: 2335 - DNA, 51 bp, Artificial Sequence
  Synthetic polynucleotide
gtgaaccttctcatccctttccaggygggactggcccccttccctgtcccc

SEQ ID NO: 2336 - DNA, 51 bp, Artificial Sequence
  Synthetic polynucleotide
ctcatgtgcccccccagccaggctcdccctgcacaatgagctcagccagcg

SEQ ID NO: 2337 - DNA, 51 bp, Artificial Sequence
  Synthetic polynucleotide
gcggccatccctgagggacagttcahtgatagcaggaagggggcagagaag

SEQ ID NO: 2338 - DNA, 51 bp, Artificial Sequence
  Synthetic polynucleotide
tgccagcatggctgccagaacatcaytgggggctacaggtgcagctgcccc

SEQ ID NO: 2339 - DNA, 51 bp, Artificial Sequence
  Synthetic polynucleotide
ggctgctgatgacacctgggagccayttgcctctgggtaagttgccaaaga

SEQ ID NO: 2340 - DNA, 51 bp, Artificial Sequence
  Synthetic polynucleotide
gaggttgcggcggaagcggagaccaygttccgagcggcggctccggggcag

SEQ ID NO: 2341 - DNA, 51 bp, Artificial Sequence
  Synthetic polynucleotide
gcgggccgggcgcggggaggtgtcaygcgccggaacctgcgcttggggcca

SEQ ID NO: 2342 - DNA, 51 bp, Artificial Sequence
  Synthetic polynucleotide
ctcagtgctgagcccatctgaggccygtggcctgctcctgggctccacctg

SEQ ID NO: 2343 - DNA, 51 bp, Artificial Sequence
  Synthetic polynucleotide
ttcctggaattggaggcatcgcaggyaacatctgtcccagcagggggcggg

SEQ ID NO: 2344 - DNA, 51 bp, Artificial Sequence
  Synthetic polynucleotide
tggacatcttttaaccaggagagaaytgttgatgttgctggaccagggggt

SEQ ID NO: 2345 - DNA, 51 bp, Artificial Sequence
  Synthetic polynucleotide
gagcacccctgcctggtggagctgcygtcccatgtgctgaaagtccaggac

SEQ ID NO: 2346 - DNA, 51 bp, Artificial Sequence
  Synthetic polynucleotide
ctctacgggtctcaccctttctaccbggcgctggaggacggcgggtcggca

SEQ ID NO: 2347 - DNA, 51 bp, Artificial Sequence
  Synthetic polynucleotide
aatgtgtcccagggtattttattacytctcatgttaaaacaacatttgaag

SEQ ID NO: 2348 - DNA, 51 bp, Artificial Sequence
  Synthetic polynucleotide
attctttagcttcaaggcgtagtcadtgtcactggtggtgagcttctgccg

SEQ ID NO: 2349 - DNA, 51 bp, Artificial Sequence
  Synthetic polynucleotide
attgacaatgggaagcagcgtgagtytgagagccggctggcggatgcgctg

SEQ ID NO: 2350 - DNA, 51 bp, Artificial Sequence
  Synthetic polynucleotide
ggactggatccacagcaacatctacyggaccgactctgtcctgggcactgt

SEQ ID NO: 2351 - DNA, 51 bp, Artificial Sequence
  Synthetic polynucleotide
catgaacaattctccatttgacttaygtcatgttttgttatctttattaga

SEQ ID NO: 2352 - DNA, 51 bp, Artificial Sequence
  Synthetic polynucleotide
cttacagggcgaggcacggtgtgagygccgcctggaggtgcgaggtgagga

SEQ ID NO: 2353 - DNA, 51 bp, Artificial Sequence
  Synthetic polynucleotide
ttcagcaagcagggagtgttgactcyggagattagaaagccctgccccttt

SEQ ID NO: 2354 - DNA, 51 bp, Artificial Sequence
  Synthetic polynucleotide
cagaaagccgacaagaagaccatggbgagcccagggtctggggtccccacg

SEQ ID NO: 2355 - DNA, 51 bp, Artificial Sequence
  Synthetic polynucleotide
cgcaaaggaccaggcggtgttcaaaygtgaggtctcagatgagaatgttcg

SEQ ID NO: 2356 - DNA, 51 bp, Artificial Sequence
  Synthetic polynucleotide
atcggaggagggggcgcaagtcaaabggtgagttccagaagcacggggcat

SEQ ID NO: 2357 - DNA, 51 bp, Artificial Sequence
  Synthetic polynucleotide
tgcccagcctgccttcactggcagcyaccgctgtgaggtgtccaccaagga

SEQ ID NO: 2358 - DNA, 51 bp, Artificial Sequence
  Synthetic polynucleotide
ggagcccccgatgaccccattggccycttcgtgatgcggccacaggatggc

SEQ ID NO: 2359 - DNA, 51 bp, Artificial Sequence
  Synthetic polynucleotide
gatgctgaggagcgctgtgatcagcygatcaaaaacaagattcagctggag

SEQ ID NO: 2360 - DNA, 51 bp, Artificial Sequence
  Synthetic polynucleotide
tcgggccttcatgggggtcaagaatyggccctggatgaagctctacttcaa

SEQ ID NO: 2361 - DNA, 51 bp, Artificial Sequence
  Synthetic polynucleotide
gtcctggacatcgctggcttcgagaycttcgatgtgagttgggacccctgg

SEQ ID NO: 2362 - DNA, 51 bp, Artificial Sequence
  Synthetic polynucleotide
cacttcagaggagaaaaactccatgyataagctgacaggcgccatcatgca

SEQ ID NO: 2363 - DNA, 51 bp, Artificial Sequence
  Synthetic polynucleotide
cgtccggaacgacaactcctcccgcytcgtgagtggtccctgaccttggcc

SEQ ID NO: 2364 - DNA, 51 bp, Artificial Sequence
  Synthetic polynucleotide
ctgcctgatggccaagtcatcactaytggcaatgagcgcttccgctgtcct

SEQ ID NO: 2365 - DNA, 51 bp, Artificial Sequence
  Synthetic polynucleotide
  misc_feature (26)..(26): n is a, c, g, t or u
gcagcagaagaagcggctggaagccnttctcacccagaaagccaaggtcgg

SEQ ID NO: 2366 - DNA, 51 bp, Artificial Sequence
  Synthetic polynucleotide
ccagaactacatctgggctgcgcgcytgcgcttcgcttcctggccctcgtt

SEQ ID NO: 2367 - DNA, 51 bp, Artificial Sequence
  Synthetic polynucleotide
tatctagactttgtctttgctgtggygagtaacagattttttaaagttagg

SEQ ID NO: 2368 - DNA, 51 bp, Artificial Sequence
  Synthetic polynucleotide
tcgcgcgagccctcccaggtcatctyctgcaatcgcagtccgcgcgtcgtg

SEQ ID NO: 2369 - DNA, 51 bp, Artificial Sequence
  Synthetic polynucleotide
ccgcgcgtcgtgctgcccgtatggchcaacttcgacggcgagccgcagccc

SEQ ID NO: 2370 - DNA, 51 bp, Artificial Sequence
  Synthetic polynucleotide
gtttttgcccttccagtgtatactchgaaagagcgatgcctccaggttgtc

SEQ ID NO: 2371 - DNA, 51 bp, Artificial Sequence
  Synthetic polynucleotide
gcagtgtagctacttcttctattggyaatcttcttgtacatatagtagatt

SEQ ID NO: 2372 - DNA, 51 bp, Artificial Sequence
  Synthetic polynucleotide
aggtgttggaaaaacacaattatggyaaaataaagtgttctccttttaagg

SEQ ID NO: 2373 - DNA, 51 bp, Artificial Sequence
  Synthetic polynucleotide
cacaaggacatcaagccggggaaccygctgctcaccaccggtggcaccctc

SEQ ID NO: 2374 - DNA, 51 bp, Artificial Sequence
  Synthetic polynucleotide
ggacaacacgcaggtgcccagctacygcctgaatgcacgcggcgagggggc

SEQ ID NO: 2375 - DNA, 51 bp, Artificial Sequence
  Synthetic polynucleotide
actgaagggatctgcaggaatcgtgygactaataatgtaaaagacgtcact

SEQ ID NO: 2376 - DNA, 51 bp, Artificial Sequence
  Synthetic polynucleotide
gcagtgcctgcagcgccggcggcgaygcggtcagttctgttcacccggacc

SEQ ID NO: 2377 - DNA, 51 bp, Artificial Sequence
  Synthetic polynucleotide
tagtgaagaagaaatccgtgaggcaytccgagtctttgacaaggtaatcca

SEQ ID NO: 2378 - DNA, 51 bp, Artificial Sequence
  Synthetic polynucleotide
gaagatagaaagaatattctcaggcytcaagatttggtagataaacttcag

SEQ ID NO: 2379 - DNA, 51 bp, Artificial Sequence
  Synthetic polynucleotide
ctacgagtgcattctctgtgcctgcygtagcaccagctgccccagctactg

SEQ ID NO: 2380 - DNA, 51 bp, Artificial Sequence
  Synthetic polynucleotide
aaagggacgaactggtgtaatgataygtgcatatttattacatcggggcaa

SEQ ID NO: 2381 - DNA, 51 bp, Artificial Sequence
  Synthetic polynucleotide
atgtgtgttctgaaattgtgaaccaygagtctagtacttaatgatctgctt

SEQ ID NO: 2382 - DNA, 51 bp, Artificial Sequence
  Synthetic polynucleotide
ggtcctggaaaaaagcttgggagttyggttgtatttactgccagcctcttg

SEQ ID NO: 2383 - DNA, 51 bp, Artificial Sequence
  Synthetic polynucleotide
tatgtgtattattatagctacctgtyaaagaatcatctggattatagacca

SEQ ID NO: 2384 - DNA, 51 bp, Artificial Sequence
  Synthetic polynucleotide
acgcagggcgtcaggacgcagggtcrtggagcctccgtttctctcgcattc

SEQ ID NO: 2385 - DNA, 51 bp, Artificial Sequence
  Synthetic polynucleotide
aacctggtggacaatgacttcccacyggacaactgcctctggcaggtggtg

SEQ ID NO: 2386 - DNA, 51 bp, Artificial Sequence
  Synthetic polynucleotide
ctgtggattgagcggtggggaaagcygtatgaggaggagtccccgtcccgc

SEQ ID NO: 2387 - DNA, 51 bp, Artificial Sequence
  Synthetic polynucleotide
agcgggggctatgtcttccagaaggygtggtagggaggcacggggtgcccc

SEQ ID NO: 2388 - DNA, 51 bp, Artificial Sequence
  Synthetic polynucleotide
cctggagaccatcctgcacatgaccygctgccgtcagcgcctggaggagat

SEQ ID NO: 2389 - DNA, 51 bp, Artificial Sequence
  Synthetic polynucleotide
aacccctggacggccgggatcattgygagtgtattataaggggctttgtgg

SEQ ID NO: 2390 - DNA, 51 bp, Artificial Sequence
  Synthetic polynucleotide
gtgctggagcctggggactccttccyggttggggccaatggcatttggggg

SEQ ID NO: 2391 - DNA, 51 bp, Artificial Sequence
  Synthetic polynucleotide
cttcctggttggggccaatggcattygggggcagcgagccgtggacatcgg

SEQ ID NO: 2392 - DNA, 51 bp, Artificial Sequence
  Synthetic polynucleotide
actcggcagaggctggtgctggagaytggggacccagaaggtacctctagc

SEQ ID NO: 2393 - DNA, 51 bp, Artificial Sequence
  Synthetic polynucleotide
cgccatcgccgcggagccggcggccracagccctttctgcagcggggaggt

SEQ ID NO: 2394 - DNA, 51 bp, Artificial Sequence
  Synthetic polynucleotide
gtatacatacccagtggccacccagygtcactgtggcaagtgtgacagcga

SEQ ID NO: 2395 - DNA, 51 bp, Artificial Sequence
  Synthetic polynucleotide
cgcctgggtcgcttcctctggtcgcygcccgtggcccctgcggcctgcgag

SEQ ID NO: 2396 - DNA, 51 bp, Artificial Sequence
  Synthetic polynucleotide
aaagcataaaaaccattacaagatahacaatctgtaagtatgttttcttat

SEQ ID NO: 2397 - DNA, 51 bp, Artificial Sequence
  Synthetic polynucleotide
gagaagcacctggatattcctaaaaygttggatgctgaaggtgagatgaaa

SEQ ID NO: 2398 - DNA, 51 bp, Artificial Sequence
  Synthetic polynucleotide
gcagaactccatccgccacaatctgyccctcaacaagtgcttcgtgaaggt

SEQ ID NO: 2399 - DNA, 51 bp, Artificial Sequence
  Synthetic polynucleotide
attccatccatcatgaatgtgcttcyggtttgtcttatattctggctaatt

SEQ ID NO: 2400 - DNA, 51 bp, Artificial Sequence
  Synthetic polynucleotide
gctctgggaaatttaaccctcgtctyggccatcatcgtcttcatttttgcc

SEQ ID NO: 2401 - DNA, 51 bp, Artificial Sequence
  Synthetic polynucleotide
ctaataaatttgatcctggctgtgghggccatggcctacgaggaacagaat

SEQ ID NO: 2402 - DNA, 51 bp, Artificial Sequence
  Synthetic polynucleotide
tttcttttaccccacttgcagccaaygtccagagggatatatgtgtgtgaa

SEQ ID NO: 2403 - DNA, 51 bp, Artificial Sequence
  Synthetic polynucleotide
agatgtaatgatcctgactgtgttcygtctgagcgtatttgctctaattgg

SEQ ID NO: 2404 - DNA, 51 bp, Artificial Sequence
  Synthetic polynucleotide
ttccggttcagtgccacctctgcccygtacattttaactcccttcaatcct

SEQ ID NO: 2405 - DNA, 51 bp, Artificial Sequence
  Synthetic polynucleotide
gcagaatcagaaccagctcttttgayagggagcaagcagttcgggctttca

SEQ ID NO: 2406 - DNA, 51 bp, Artificial Sequence
  Synthetic polynucleotide
gtctgtgacatttcctgttgtgaagyaaaagagggacccctgcgtcctgct

SEQ ID NO: 2407 - DNA, 51 bp, Artificial Sequence
  Synthetic polynucleotide
ctttgggattacgtctatcagttgcyttctgacagccggtacgaaaacttc

SEQ ID NO: 2408 - DNA, 51 bp, Artificial Sequence
  Synthetic polynucleotide
atgaacatcattgacattgtggccaycatcccctacttcatcaccctgggg

SEQ ID NO: 2409 - DNA, 51 bp, Artificial Sequence
  Synthetic polynucleotide
gtgtcccccacctagtttgcagaccygacagacgctgctgcccgcaacgcg

SEQ ID NO: 2410 - DNA, 51 bp, Artificial Sequence
  Synthetic polynucleotide
gagatgatggagctcaatgaccgctytgccagctacatcgagaaggttcgc

SEQ ID NO: 2411 - DNA, 51 bp, Artificial Sequence
  Synthetic polynucleotide
acccgggccagtgagcgggcagagadgatggagctcaatgaccgctttgcc

SEQ ID NO: 2412 - DNA, 51 bp, Artificial Sequence
  Synthetic polynucleotide
tttgcctgatgcccatgatgcagacyctggtaagaacgagctccttgggcc

SEQ ID NO: 2413 - DNA, 51 bp, Artificial Sequence
  Synthetic polynucleotide
tcccggaagctggcggagcaggagcygattgagactagtgagcgggtgcag

SEQ ID NO: 2414 - DNA, 51 bp, Artificial Sequence
  Synthetic polynucleotide
atggaacaggccaagcgcaaccaccwgcgggtggtggactcgctgcagacc

SEQ ID NO: 2415 - DNA, 51 bp, Artificial Sequence
  Synthetic polynucleotide
tgagtcttgatgaagcctacttgaayataacaaagcacttagaagaaagac

SEQ ID NO: 2416 - DNA, 51 bp, Artificial Sequence
  Synthetic polynucleotide
tattttataatcaatgaatttgttcyttctgattttaagtttgcagattta

SEQ ID NO: 2417 - DNA, 51 bp, Artificial Sequence
  Synthetic polynucleotide
agtcctgggggccagtctgttgtgcyaggaagttatgacaggtaagtcccc

SEQ ID NO: 2418 - DNA, 51 bp, Artificial Sequence
  Synthetic polynucleotide
gacatctgctgctttcatattttcayacattactgcagtaacactccacca

SEQ ID NO: 2419 - DNA, 51 bp, Artificial Sequence
  Synthetic polynucleotide
ctcttcctagctgaggtggtgctgcyctgctgggtcaagttcttgcccctc

SEQ ID NO: 2420 - DNA, 51 bp, Artificial Sequence
  Synthetic polynucleotide
gagttctacctcagtctaatcctgcygcagaactatcaggtacttagattc

SEQ ID NO: 2421 - DNA, 51 bp, Artificial Sequence
  Synthetic polynucleotide
aaactggccttcagtgagttctaccycagtctaatcctgctgcagaactat

SEQ ID NO: 2422 - DNA, 51 bp, Artificial Sequence
  Synthetic polynucleotide
gacagacaaaaggctatgaagcgttyacgtgtcccccctttgggagctgct

SEQ ID NO: 2423 - DNA, 51 bp, Artificial Sequence
  Synthetic polynucleotide
cgggtggacatccagaacaagcgctyctacctggacgtgaagcagaacgcc

SEQ ID NO: 2424 - DNA, 51 bp, Artificial Sequence
  Synthetic polynucleotide
ctgggctccacgcagggccagaccaytgcgctgcccgcgcaggggctcatc

SEQ ID NO: 2425 - DNA, 51 bp, Artificial Sequence
  Synthetic polynucleotide
tctgactcccaggacgggcaccaggkgagtcacctagtaggggcggcggcg

SEQ ID NO: 2426 - DNA, 51 bp, Artificial Sequence
  Synthetic polynucleotide
tccaggggacccaagggctacaaggygagcgtgggctgctgggagggggga

SEQ ID NO: 2427 - DNA, 51 bp, Artificial Sequence
  Synthetic polynucleotide
tcactctcaggagaccattgcatcaytggccgcacactggtggtaagtttt

SEQ ID NO: 2428 - DNA, 51 bp, Artificial Sequence
  Synthetic polynucleotide
cttctactacactgtgatgttccggygagtgggccacactggctggcctgg

SEQ ID NO: 2429 - DNA, 51 bp, Artificial Sequence
  Synthetic polynucleotide
ggtctagactatcagaatccataccygagtccatttagagagttccaaagg

SEQ ID NO: 2430 - DNA, 51 bp, Artificial Sequence
  Synthetic polynucleotide
cagctgtggactccaggggggtaggytgccacagtggcttcttccaccaag

SEQ ID NO: 2431 - DNA, 51 bp, Artificial Sequence
  Synthetic polynucleotide
ttcacagggattttcacagcagagabgaccttcaagatcattgccctcgac

SEQ ID NO: 2432 - DNA, 51 bp, Artificial Sequence
  Synthetic polynucleotide
agagttagaggagtctcgccacaagbgtccaccatgctggaaccgtctcgc

SEQ ID NO: 2433 - DNA, 51 bp, Artificial Sequence
  Synthetic polynucleotide
gaaaagcagaggacccaggaagagcygaggaggctctcttctgaggtcgag

SEQ ID NO: 2434 - DNA, 51 bp, Artificial Sequence
  Synthetic polynucleotide
cggggcgacgtcgtcgtggccatccygggtatggggtggggggcgggcact

SEQ ID NO: 2435 - DNA, 51 bp, Artificial Sequence
  Synthetic polynucleotide
ttcatctcccggggctccatcgagaycctgcggggcgacgtcgtcgtggcc

SEQ ID NO: 2436 - DNA, 51 bp, Artificial Sequence
  Synthetic polynucleotide
ctgcgtcatgctcattggctgtgagygtgcccaggggcgggcggcggggag

SEQ ID NO: 2437 - DNA, 51 bp, Artificial Sequence
  Synthetic polynucleotide
tcccaacaccaactcagagaagatcbtctccatctgcgtcatgctcattgg

SEQ ID NO: 2438 - DNA, 51 bp, Artificial Sequence
  Synthetic polynucleotide
ctacacggctgtcttcacaccctacycggctgccttcctgctgaaggagac

SEQ ID NO: 2439 - DNA, 51 bp, Artificial Sequence
  Synthetic polynucleotide
gctcgggtggagaactgcgccgtcahctactgcaacgacggcttctgcgag

SEQ ID NO: 2440 - DNA, 51 bp, Artificial Sequence
  Synthetic polynucleotide
gtctttgccatctccttctttgcgcycccagcggtaggtgccccgtgggtg

SEQ ID NO: 2441 - DNA, 51 bp, Artificial Sequence
  Synthetic polynucleotide
cccaaacccaagaagtctgtggtggygagtagcccacctgccaccagggca

SEQ ID NO: 2442 - DNA, 51 bp, Artificial Sequence
  Synthetic polynucleotide
cctcgccctgtctgaggatcatgccygggtagtgtttgggcccaatgggga

SEQ ID NO: 2443 - DNA, 51 bp, Artificial Sequence
  Synthetic polynucleotide
caccattggcggcttcacatgcaaaygtcctcccggatttacccaacacca

SEQ ID NO: 2444 - DNA, 51 bp, Artificial Sequence
  Synthetic polynucleotide
atgctgctgtgacggagggagaggcyggggtccccactgtgagatctgccc

SEQ ID NO: 2445 - DNA, 51 bp, Artificial Sequence
  Synthetic polynucleotide
ctgctgtgccttgaagggagaaggcyggggagacccctgcgagctctgccc

SEQ ID NO: 2446 - DNA, 51 bp, Artificial Sequence
  Synthetic polynucleotide
cacaattggttccttcaactgccgcygcaatcatggtttcatcctttctca

SEQ ID NO: 2447 - DNA, 51 bp, Artificial Sequence
  Synthetic polynucleotide
gggaatggaacttgccggaacacaaytggttccttcaactgccgctgcaat

SEQ ID NO: 2448 - DNA, 51 bp, Artificial Sequence
  Synthetic polynucleotide
tggacctccgtggggagtgtattggyacgtgatccatcctaggttggcacc

SEQ ID NO: 2449 - DNA, 51 bp, Artificial Sequence
  Synthetic polynucleotide
tctcattgaaactacagcctctgccygttacacattgaacaacataatcca

SEQ ID NO: 2450 - DNA, 51 bp, Artificial Sequence
  Synthetic polynucleotide
agacctcacagtaaaaataggtgatyttggtctagctacagtgaaatctcg

SEQ ID NO: 2451 - DNA, 51 bp, Artificial Sequence
  Synthetic polynucleotide
gccgtgtgccaatccattgtccaccyctttgaggatgacatggtggaggtg

SEQ ID NO: 2452 - DNA, 51 bp, Artificial Sequence
  Synthetic polynucleotide
gaagcagataccccaggaattcagahtgggagaaaggtaaagtatttatta

SEQ ID NO: 2453 - DNA, 51 bp, Artificial Sequence
  Synthetic polynucleotide
aggaggacctgcttacaatggaatgyaaactgcagctagccagtttctttc

SEQ ID NO: 2454 - DNA, 51 bp, Artificial Sequence
  Synthetic polynucleotide
gccattctggagctggcctatacttyagcagatggattggagtactctaga

SEQ ID NO: 2455 - DNA, 51 bp, Artificial Sequence
  Synthetic polynucleotide
agacctcactcccggggagccagcabgtccactgcggtcctggaaaaccca

SEQ ID NO: 2456 - DNA, 51 bp, Artificial Sequence
  Synthetic polynucleotide
ggcagccatggccaagctggccgccycggaggccgcgaccgccatcagcca

SEQ ID NO: 2457 - DNA, 51 bp, Artificial Sequence
  Synthetic polynucleotide
gcgtattgggcatcacagcccctggygagtatagtgtctttccctaaaaag

SEQ ID NO: 2458 - DNA, 51 bp, Artificial Sequence
  Synthetic polynucleotide
cgagcggcaggttgggtgcggaccayggcctctcacaagctgctggtgacc

SEQ ID NO: 2459 - DNA, 51 bp, Artificial Sequence
  Synthetic polynucleotide
ctctccatccccaaccagctcctgcyggggcctggtccttccaacctgcct

SEQ ID NO: 2460 - DNA, 51 bp, Artificial Sequence
  Synthetic polynucleotide
ggcctggcccagcacaagccagtgcygctgttcttaacccacggggagtcg

SEQ ID NO: 2461 - DNA, 51 bp, Artificial Sequence
  Synthetic polynucleotide
tcgtccaccggcgtgctgcagcccchtgatggcttcggggaactctgccac

SEQ ID NO: 2462 - DNA, 51 bp, Artificial Sequence
  Synthetic polynucleotide
cgcccctccagggacctcgctcatcyccttcagtgacaaggccaagtgagt

SEQ ID NO: 2463 - DNA, 51 bp, Artificial Sequence
  Synthetic polynucleotide
caagtggctggccaacttctggggcygtgacgaccagcccaggatgtgagg

SEQ ID NO: 2464 - DNA, 51 bp, Artificial Sequence
  Synthetic polynucleotide
catcacacaatccccgtcatcagccygtacagcctgagagagagcctggcc

SEQ ID NO: 2465 - DNA, 51 bp, Artificial Sequence
  Synthetic polynucleotide
ccagcgccatctcccacacagggccyggagaacagctggcgccagcaccgc

SEQ ID NO: 2466 - DNA, 51 bp, Artificial Sequence
  Synthetic polynucleotide
cagcaccgcgaggccgcggcgtatcygcatgggcgcctgcaggcactgggg

SEQ ID NO: 2467 - DNA, 51 bp, Artificial Sequence
  Synthetic polynucleotide
tgagccaggcccctcctgcaggcgcyccggcttcccacagtcaccactgtg

SEQ ID NO: 2468 - DNA, 51 bp, Artificial Sequence
  Synthetic polynucleotide
agcccgccctgtgccccccaggtgcygcggatcggcctgctgggctgcaat

SEQ ID NO: 2469 - DNA, 51 bp, Artificial Sequence
  Synthetic polynucleotide
gtgacggaggccctgagggcggcccygcagcactgccccaagaagaagctg

SEQ ID NO: 2470 - DNA, 51 bp, Artificial Sequence
  Synthetic polynucleotide
tccgaccacgtggacaagaggatccyggatgctgcaggtgcacactgggtg

SEQ ID NO: 2471 - DNA, 51 bp, Artificial Sequence
  Synthetic polynucleotide
ctggctggcctgagaggggagccgabgcctagtgaactcaagctgtagcca

SEQ ID NO: 2472 - DNA, 51 bp, Artificial Sequence
  Synthetic polynucleotide
gtcccagccaacacagggctggaccygcctgtggatgcagtggtcacgctt

SEQ ID NO: 2473 - DNA, 51 bp, Artificial Sequence
  Synthetic polynucleotide
gggatcccagggctgaagaaaatcayggactggtttggctactatggaggc

SEQ ID NO: 2474 - DNA, 51 bp, Artificial Sequence
  Synthetic polynucleotide
ttcttgactgatgcctcctggagcaytggggacgataattttaacaaagtt

SEQ ID NO: 2475 - DNA, 51 bp, Artificial Sequence
  Synthetic polynucleotide
cctgtgcaagaagcgcaatgaccacytcggccactatgtgtgccagccaga

SEQ ID NO: 2476 - DNA, 51 bp, Artificial Sequence
  Synthetic polynucleotide
ccagggggccaactatgcttgtgaaygtccccccaacttcaccggctccaa

SEQ ID NO: 2477 - DNA, 51 bp, Artificial Sequence
  Synthetic polynucleotide
tcagagcttttggaaaaacatggacycgagaaaccaatttcatttgttaaa

SEQ ID NO: 2478 - DNA, 51 bp, Artificial Sequence
  Synthetic polynucleotide
gcctccttccagggccagcccttcayctggtgcatgctgcacaactttggg

SEQ ID NO: 2479 - DNA, 51 bp, Artificial Sequence
  Synthetic polynucleotide
tctacagtttcgtctccaggtcagaygcactcggaacccccatgctgctaa

SEQ ID NO: 2480 - DNA, 51 bp, Artificial Sequence
  Synthetic polynucleotide
ccagggcatatatggctatcatcatyatatgcaggatcgcatagatgacaa

SEQ ID NO: 2481 - DNA, 51 bp, Artificial Sequence
  Synthetic polynucleotide
ccgcggtcatgtgacacagcgaagayggcgtcgcccggctgcctgtggctc

SEQ ID NO: 2482 - DNA, 51 bp, Artificial Sequence
  Synthetic polynucleotide
ctaataaatttgatcttggctgtggyggccatggcctatgaggaacagaat

SEQ ID NO: 2483 - DNA, 51 bp, Artificial Sequence
  Synthetic polynucleotide
gttgacctggccatcaccatctgcaytgtcttaaatacactcttcatggct

SEQ ID NO: 2484 - DNA, 51 bp, Artificial Sequence
  Synthetic polynucleotide
tatgcagctgttgattcacgaaatgyaagtctagttagagggaaattgttt

SEQ ID NO: 2485 - DNA, 51 bp, Artificial Sequence
  Synthetic polynucleotide
tggattaatctggtgtttattgttcygttcactggagaatgtgtgctgaaa

SEQ ID NO: 2486 - DNA, 51 bp, Artificial Sequence
  Synthetic polynucleotide
cagctcattgccatggatttgcccahggtgagtggtgaccggatccactgt

SEQ ID NO: 2487 - DNA, 51 bp, Artificial Sequence
  Synthetic polynucleotide
aatcccaattatggctacacaagctytgataccttcagttgggcttttttg

SEQ ID NO: 2488 - DNA, 51 bp, Artificial Sequence
  Synthetic polynucleotide
tcggcattgagaacattcagagttcyccgagcattgaagacgatttcagtc

SEQ ID NO: 2489 - DNA, 51 bp, Artificial Sequence
  Synthetic polynucleotide
attcaaacatacctgccatgcataaygacagtgattctctcacaagtctcc

SEQ ID NO: 2490 - DNA, 51 bp, Artificial Sequence
  Synthetic polynucleotide
gcccgtattgggcgcatcttgcgtcygatcaaaggcgccaaagggattcgt

SEQ ID NO: 2491 - DNA, 51 bp, Artificial Sequence
  Synthetic polynucleotide
ttactaccgcgagaacaagcagggcyggcagaactccatccgccacaatct

SEQ ID NO: 2492 - DNA, 51 bp, Artificial Sequence
  Synthetic polynucleotide
aagaatctcaagccggagacgctggygaggccacctcctgctccctgcctg

SEQ ID NO: 2493 - DNA, 51 bp, Artificial Sequence
  Synthetic polynucleotide
agggaagccatcccaggtaagtgccrtgagtttaggtgtgacccgcatctg

SEQ ID NO: 2494 - DNA, 51 bp, Artificial Sequence
  Synthetic polynucleotide
aggcaggtaggagacacccatctccrgcatgccggccagagtcactgggtg

SEQ ID NO: 2495 - DNA, 51 bp, Artificial Sequence
  Synthetic polynucleotide
gggtcacgtggccggcggccccccaygacgtgctggctgcggggcgtcacg

SEQ ID NO: 2496 - DNA, 51 bp, Artificial Sequence
  Synthetic polynucleotide
acccccacccccgccccagggcctcrccggatcaaaggctgggagctcgaa

SEQ ID NO: 2497 - DNA, 51 bp, Artificial Sequence
  Synthetic polynucleotide
ctcccagggcaacgtctttgccacayctgcgctccggagcctgcgcttcct

SEQ ID NO: 2498 - DNA, 51 bp, Artificial Sequence
  Synthetic polynucleotide
tattcaccttggtgctacttcttgcyatgttggagacaatactgtaggcgc

SEQ ID NO: 2499 - DNA, 51 bp, Artificial Sequence
  Synthetic polynucleotide
ccagttggatcatttactggatcctycttctttcactggtcgtgcctccca

SEQ ID NO: 2500 - DNA, 51 bp, Artificial Sequence
  Synthetic polynucleotide
gggtctggaaaaactgcagcatttcygttgcccatcttgagtcagatttat

SEQ ID NO: 2501 - DNA, 51 bp, Artificial Sequence
  Synthetic polynucleotide
taaaaattttttttctttcagatgcyggctcgtgatttcttagatgaatat

SEQ ID NO: 2502 - DNA, 51 bp, Artificial Sequence
  Synthetic polynucleotide
gacatttcaaatgtgaaacatgttaycaattttgacttgccaagtgatatt

SEQ ID NO: 2503 - DNA, 51 bp, Artificial Sequence
  Synthetic polynucleotide
accatcgccttccgacacctcttccygctgggctactcggacggagcggat

SEQ ID NO: 2504 - DNA, 51 bp, Artificial Sequence
  Synthetic polynucleotide
tactgcttctgtggctggatcgtgcyggggccctatcatgtgaaggtacat

SEQ ID NO: 2505 - DNA, 51 bp, Artificial Sequence
  Synthetic polynucleotide
ccccgcgaagccatcagtactttgtytgacaacaatacatgggtgaaacac

SEQ ID NO: 2506 - DNA, 51 bp, Artificial Sequence
  Synthetic polynucleotide
cagctccgaactggaaggcgcctgcyctgagtacctggcaccgctgagcgc

SEQ ID NO: 2507 - DNA, 51 bp, Artificial Sequence
  Synthetic polynucleotide
ggacgccaactccgacttctcctccyacgccgactcgctctggtgggggac

SEQ ID NO: 2508 - DNA, 51 bp, Artificial Sequence
  Synthetic polynucleotide
cttctcctcctacgccgactcgctcyggtgggggacggtgcgtgagggtct

SEQ ID NO: 2509 - DNA, 51 bp, Artificial Sequence
  Synthetic polynucleotide
ggggaagaaaccagcgaagccaaaabgccctgccgtgtgtacttgtaccaa

SEQ ID NO: 2510 - DNA, 51 bp, Artificial Sequence
  Synthetic polynucleotide
cagctcagccagctccagaagcaggygataccccacctcacccctctctcc

SEQ ID NO: 2511 - DNA, 51 bp, Artificial Sequence
  Synthetic polynucleotide
aaacgtgcctttgttcactggtacgytggggaggggatggaggaaggtgag

SEQ ID NO: 2512 - DNA, 51 bp, Artificial Sequence
  Synthetic polynucleotide
gacgtgttcaatatgttctgttaccytggtcctcacctttctcacgatccc

SEQ ID NO: 2513 - DNA, 51 bp, Artificial Sequence
  Synthetic polynucleotide
acatcaacagaaaactccaaattttyccacacttctttgctatgatcgagt

SEQ ID NO: 2514 - DNA, 51 bp, Artificial Sequence
  Synthetic polynucleotide
gattatataaagcgagtgccttcaaytgatgtactctgtaatgaatttcat

SEQ ID NO: 2515 - DNA, 51 bp, Artificial Sequence
  Synthetic polynucleotide
caggtagcagcaagaggactggacayttcaaatgtgaaacatgttatcaat

SEQ ID NO: 2516 - DNA, 51 bp, Artificial Sequence
  Synthetic polynucleotide
tgaataaaaatcacagttattacttrccaaggcctttgattcttggtagta

SEQ ID NO: 2517 - DNA, 51 bp, Artificial Sequence
  Synthetic polynucleotide
atgaacatcttcgtgggcttcgtcaycgtcacctttcaggagcagggggag

SEQ ID NO: 2518 - DNA, 51 bp, Artificial Sequence
  Synthetic polynucleotide
tgtacatcaggaagtggctctggtcytccttttctggtacaaagaacagtg

SEQ ID NO: 2519 - DNA, 51 bp, Artificial Sequence
  Synthetic polynucleotide
ccctacgggcgtctggcctaccaccyggctgtggtgctgggcagtgctgcc

SEQ ID NO: 2520 - DNA, 51 bp, Artificial Sequence
  Synthetic polynucleotide
agctgcctttccgaagtgcccatcaycttcaccctgctgggcgtgggaacc

SEQ ID NO: 2521 - DNA, 51 bp, Artificial Sequence
  Synthetic polynucleotide
ggtctgcgtcttcggaatgggctccygggtgaccatcaatgggctctgggt

SEQ ID NO: 2522 - DNA, 51 bp, Artificial Sequence
  Synthetic polynucleotide
ccataccttaccactaaatgtagtgyaagtatagagctgtcttattcttgt

SEQ ID NO: 2523 - DNA, 51 bp, Artificial Sequence
  Synthetic polynucleotide
cgtaatctgaatcttttttctccccdtagtccccgtttttcttctctctct

SEQ ID NO: 2524 - DNA, 51 bp, Artificial Sequence
  Synthetic polynucleotide
aatactcgctgaccctgcttgtgccrtattttcaacaaagactcaacaaca

SEQ ID NO: 2525 - DNA, 51 bp, Artificial Sequence
  Synthetic polynucleotide
gttcatgctgttctacaaagaggcgyaagtagaagagttagagagacgctg

SEQ ID NO: 2526 - DNA, 51 bp, Artificial Sequence
  Synthetic polynucleotide
ctcccgcccgcgttgaagaactcacrcttggccactgggaggcagagatga

SEQ ID NO: 2527 - DNA, 51 bp, Artificial Sequence
  Synthetic polynucleotide
cattatgctctccacagtggagtgaygcttcggggctcaggcatccagtgg

SEQ ID NO: 2528 - DNA, 51 bp, Artificial Sequence
  Synthetic polynucleotide
aaggaagtgataaactatgaggacaytgaggctctcattggcccgccgccc

SEQ ID NO: 2529 - DNA, 51 bp, Artificial Sequence
  Synthetic polynucleotide
cacacgcaaatttccttccactcggrtaagatgctgaggaggggccagacc

SEQ ID NO: 2530 - DNA, 51 bp, Artificial Sequence
  Synthetic polynucleotide
aggttaatgcctgataaagaaagcakgtattacccacgggtacaacattac

SEQ ID NO: 2531 - DNA, 51 bp, Artificial Sequence
  Synthetic polynucleotide
tgcctgccaacgtacaacaatcaacyggttttcaccaagtccaaccaccgc

SEQ ID NO: 2532 - DNA, 51 bp, Artificial Sequence
  Synthetic polynucleotide
ttaattcctccattttcccaccagayggaaggactggagctttgtggacaa

SEQ ID NO: 2533 - DNA, 51 bp, Artificial Sequence
  Synthetic polynucleotide
aaattgttcttttcataccgtggctrggagagactgaagttcaatttccag

SEQ ID NO: 2534 - DNA, 51 bp, Artificial Sequence
  Synthetic polynucleotide
ccaggtgtattcaatggaaagcgtgbcctggtggttggcctggggaattcg

SEQ ID NO: 2535 - DNA, 51 bp, Artificial Sequence
  Synthetic polynucleotide
gaaattcaagctgaaataagtgaacygttagaagagcacacggaggagtac

SEQ ID NO: 2536 - DNA, 51 bp, Artificial Sequence
  Synthetic polynucleotide
taccaagtcatattttcttcacagaytgatggaacatttaaaatagatatt

SEQ ID NO: 2537 - DNA, 51 bp, Artificial Sequence
  Synthetic polynucleotide
cctgtaacaaatgtattaaatattcrttctgagaattaatgatactggcac

SEQ ID NO: 2538 - DNA, 51 bp, Artificial Sequence
  Synthetic polynucleotide
cgtttggccctcccgcacgcctgacrggagcttccatgccgcccctgcagt

SEQ ID NO: 2539 - DNA, 51 bp, Artificial Sequence
  Synthetic polynucleotide
acatccctctctgctctgcagcaaaktcaaccaccagaacattgttcgctg

SEQ ID NO: 2540-3143 - skipped (604 entries)

SEQ ID NO: 3144 - DNA, 51 bp, Artificial Sequence
  Synthetic polynucleotide
gtgggcccccacccgctagttgtcavcatgtactttgctactggcttcagt

SEQ ID NO: 3145 - DNA, 51 bp, Artificial Sequence
  Synthetic polynucleotide
ctagtgcggctgtggttgctttttcvgatttccattcccaataacgtgaag

SEQ ID NO: 3146 - DNA, 51 bp, Artificial Sequence
  Synthetic polynucleotide
tatgttttcagaaacttggatcctgrggtaaaaacaagaaatgagtgttaa

SEQ ID NO: 3147 - DNA, 51 bp, Artificial Sequence
  Synthetic polynucleotide
ggcaacctggacccctgtgccttgtrtgcatctgaggtaacagccagggcc

SEQ ID NO: 3148 - DNA, 51 bp, Artificial Sequence
  Synthetic polynucleotide
acagaggactgcagaaaatcaacctrtcctccttcaggaccaacgtgagta

SEQ ID NO: 3149 - DNA, 51 bp, Artificial Sequence
  Synthetic polynucleotide
gggtagatggtatgtggtacaaacarattatgaccgttggaaacatccctt

SEQ ID NO: 3150 - DNA, 51 bp, Artificial Sequence
  Synthetic polynucleotide
ggtgactcccccatcccgcaggaccragttcctgagcgacaggtggatgct

SEQ ID NO: 3151 - DNA, 51 bp, Artificial Sequence
  Synthetic polynucleotide
ggcgttgttgttccggatccaggttrcctaatgggagtgcgagagctctgc

SEQ ID NO: 3152 - DNA, 51 bp, Artificial Sequence
  Synthetic polynucleotide
gataactgcactttcaacacctgccrgaaagctcttgggaaggatgatttt

SEQ ID NO: 3153 - DNA, 51 bp, Artificial Sequence
  Synthetic polynucleotide
gatttacaccaatcaagagaaaaccrggtgggtcctcccaacccccaatca

SEQ ID NO: 3154 - DNA, 51 bp, Artificial Sequence
  Synthetic polynucleotide
agtgcgaaggatctggtagagaacargttcctgctgcccagtgccaactcc

SEQ ID NO: 3155 - DNA, 51 bp, Artificial Sequence
  Synthetic polynucleotide
tttttattctacctctcctttgaacrgcatcctggtggggaagaagtttta

SEQ ID NO: 3156 - DNA, 51 bp, Artificial Sequence
  Synthetic polynucleotide
cgcttcaagctctggtacacgctggrcagagcccctgaaggtgagtgaggg

SEQ ID NO: 3157 - DNA, 51 bp, Artificial Sequence
  Synthetic polynucleotide
attattattgttattactattactgrtttttaaaaatgcttgttgatagaa

SEQ ID NO: 3158 - DNA, 51 bp, Artificial Sequence
  Synthetic polynucleotide
tggcccagaaaggccgcggtctcgtrgtccggtgagccggtcactctcccc

SEQ ID NO: 3159 - DNA, 51 bp, Artificial Sequence
  Synthetic polynucleotide
gagtgtaccaaaacgtgccagaactrtgacctggagtgcatgagcatgggc

SEQ ID NO: 3160 - DNA, 51 bp, Artificial Sequence
  Synthetic polynucleotide
acctgcggcctgtgtgggaattacartggcaaccagggcgacgacttcctt

SEQ ID NO: 3161 - DNA, 51 bp, Artificial Sequence
  Synthetic polynucleotide
actttcccagaagatggaggagagtrtatgtgtaaagcagtcaacaataaa

SEQ ID NO: 3162 - DNA, 51 bp, Artificial Sequence
  Synthetic polynucleotide
cgaaaggggcttgaagttaatgtcaraggtgaattattttgataatctagc

SEQ ID NO: 3163 - DNA, 51 bp, Artificial Sequence
  Synthetic polynucleotide
tctctttgtctttctcttttttaaaraattcaggctctgctggttcttcat

SEQ ID NO: 3164 - DNA, 51 bp, Artificial Sequence
  Synthetic polynucleotide
cctacagacctggagacaagaagctrtaagtatcttctcttgtccatggtg

SEQ ID NO: 3165 - DNA, 51 bp, Artificial Sequence
  Synthetic polynucleotide
aaaaacatgttattttccttcttcarctagattacagatctgcttgatgtt

SEQ ID NO: 3166 - DNA, 51 bp, Artificial Sequence
  Synthetic polynucleotide
taccatggccttctggggaacaggtrtgggatagggcagttgggcaatctc

SEQ ID NO: 3167 - DNA, 51 bp, Artificial Sequence
  Synthetic polynucleotide
ctggccaagcagccgtctttccgccrgtactccggctacctcaaaggctcc

SEQ ID NO: 3168 - DNA, 51 bp, Artificial Sequence
  Synthetic polynucleotide
ctttagaaataccagatcctattatrtaatggagatgtagacatggcctgc

SEQ ID NO: 3169 - DNA, 51 bp, Artificial Sequence
  Synthetic polynucleotide
ctcccacatcgcctttctcacgatcraggtagggactgggcctgctgagag

SEQ ID NO: 3170 - DNA, 51 bp, Artificial Sequence
  Synthetic polynucleotide
ttccaaacacagtagggtcccctttytatgggaggaaaacacaaaaggagc

SEQ ID NO: 3171 - DNA, 51 bp, Artificial Sequence
  Synthetic polynucleotide
taatctgctgtatgatcggggcacaragtttggcctcttcactccaggatc

SEQ ID NO: 3172 - DNA, 51 bp, Artificial Sequence
  Synthetic polynucleotide
aacaatccaaatggccatgggcacarttataaaggtgagagaaaaactgat

SEQ ID NO: 3173 - DNA, 51 bp, Artificial Sequence
  Synthetic polynucleotide
actgtttgggaaatgcaacaatccaratggccatgggcacaattataaagg

SEQ ID NO: 3174 - DNA, 51 bp, Artificial Sequence
  Synthetic polynucleotide
gaaaatgtagctgtttatatctgggrcaacctccagaaagttcttcctgta

SEQ ID NO: 3175 - DNA, 51 bp, Artificial Sequence
  Synthetic polynucleotide
ccccatttcccaggtatgatcgggtrcggcatggccaagggtgctgttcac

SEQ ID NO: 3176 - DNA, 51 bp, Artificial Sequence
  Synthetic polynucleotide
tctatttttctttatcatcccttcarctggcaatcagaaatgcacttaaac

SEQ ID NO: 3177 - DNA, 51 bp, Artificial Sequence
  Synthetic polynucleotide
ttcatcaatatctgtgaaaacagcaytgcaaccacattgtcaggtctgctt

SEQ ID NO: 3178 - DNA, 51 bp, Artificial Sequence
  Synthetic polynucleotide
gatcctctctctttttttcccatttrggtgtgaaatgtttctcttattcta

SEQ ID NO: 3179 - DNA, 51 bp, Artificial Sequence
  Synthetic polynucleotide
agggcctttaatgtggaactggctcrggctggtattaagataccttaaaat

SEQ ID NO: 3180 - DNA, 51 bp, Artificial Sequence
  Synthetic polynucleotide
actaaaacgattgtaacactgtagayaccttagagaacaatggatttccat

SEQ ID NO: 3181 - DNA, 51 bp, Artificial Sequence
  Synthetic polynucleotide
gagacctcactcccggggagccagcdtgtccactgcggtcctggaaaaccc

SEQ ID NO: 3182 - DNA, 51 bp, Artificial Sequence
  Synthetic polynucleotide
tccttgtataaaacccatgcttgctrtgagtacaatcacatttttccactt

SEQ ID NO: 3183 - DNA, 51 bp, Artificial Sequence
  Synthetic polynucleotide
atacctcggcccttctcagttcgctrcgacccatacacccaaaggattgag

SEQ ID NO: 3184 - DNA, 51 bp, Artificial Sequence
  Synthetic polynucleotide
cttgaaaagtactgtggcttccatgragataacattccccagctggaagac

SEQ ID NO: 3185 - DNA, 51 bp, Artificial Sequence
  Synthetic polynucleotide
ttctattttcccccaattacaggaarttggccttgcctctctgggtgcacc

SEQ ID NO: 3186 - DNA, 51 bp, Artificial Sequence
  Synthetic polynucleotide
ttccagcccctgtattacgtggcagrgagttttaatgatgccaaggagaaa

SEQ ID NO: 3187 - DNA, 51 bp, Artificial Sequence
  Synthetic polynucleotide
tgtcatcctttggtgaattacaggtvtgaccttcacaggaaccaaggatag

SEQ ID NO: 3188 - DNA, 51 bp, Artificial Sequence
  Synthetic polynucleotide
agaccttctcgtttaaagaaagatgvgtatgaatttttcacccatttggat

SEQ ID NO: 3189 - DNA, 51 bp, Artificial Sequence
  Synthetic polynucleotide
cattaaaaactgcccaaagaaaaccrggaatcttaagaaaataactcgtga

SEQ ID NO: 3190 - DNA, 51 bp, Artificial Sequence
  Synthetic polynucleotide
ggctctgcctgtcgggcttgggcctrctactcagctgtgaacccagtaggt

SEQ ID NO: 3191 - DNA, 51 bp, Artificial Sequence
  Synthetic polynucleotide
ttggtccccgcgcagccccagctcarcgtgtgcaactgggcggtcatggta

SEQ ID NO: 3192 - DNA, 51 bp, Artificial Sequence
  Synthetic polynucleotide
actctttttgaaactgatgaacgctrccgacatttaggattctctgttgat

SEQ ID NO: 3193 - DNA, 51 bp, Artificial Sequence
  Synthetic polynucleotide
taacttcttggcatccttgtagggcrtagacgagggccccgaggggctgaa

SEQ ID NO: 3194 - DNA, 51 bp, Artificial Sequence
  Synthetic polynucleotide
gtgcacggggccggtaatttggtcarcacttactatgacttttccaagggc

SEQ ID NO: 3195 - DNA, 51 bp, Artificial Sequence
  Synthetic polynucleotide
cattgaccacaaaaagagtgatgacrggacacttgtggaccgaatcttgga

SEQ ID NO: 3196 - DNA, 51 bp, Artificial Sequence
  Synthetic polynucleotide
agcaccgaggccattctccattccarcaacaccagggacatggagtccgac

SEQ ID NO: 3197 - DNA, 51 bp, Artificial Sequence
  Synthetic polynucleotide
tactatgacttttccaagggcattgrccacaaaaagagtgatgacaggaca

SEQ ID NO: 3198 - DNA, 51 bp, Artificial Sequence
  Synthetic polynucleotide
gttgcaacaggatataaaaatatgtrttcaacaaacatattcaccaaaagg

SEQ ID NO: 3199 - DNA, 51 bp, Artificial Sequence
  Synthetic polynucleotide
cgggaccctggggaagcgcggccagrtatcacccaccaggtaactccaggg

SEQ ID NO: 3200 - DNA, 51 bp, Artificial Sequence
  Synthetic polynucleotide
ctgctgctctggtcctaggctccgtrtgtggatgtgatctgtttgaacagc

SEQ ID NO: 3201 - DNA, 51 bp, Artificial Sequence
  Synthetic polynucleotide
ctggcgcccagctcagccactgaagracaggcaaatcaaagcttccttcaa

SEQ ID NO: 3202 - DNA, 51 bp, Artificial Sequence
  Synthetic polynucleotide
tcccccaggacctgagcactggcatvaggacttccccattgccaagggaga

SEQ ID NO: 3203 - DNA, 51 bp, Artificial Sequence
  Synthetic polynucleotide
tttataggtgggaccaattttgcctrttggaatggtaagagcactttaata

SEQ ID NO: 3204 - DNA, 51 bp, Artificial Sequence
  Synthetic polynucleotide
tttgcagggtttggtttctaacctgrctctcagttccaatatcctcacgga

SEQ ID NO: 3205 - DNA, 51 bp, Artificial Sequence
  Synthetic polynucleotide
gagagtcaggttagaaaccaaacccygcaaagcagaaacagagcacagtga

SEQ ID NO: 3206 - DNA, 51 bp, Artificial Sequence
  Synthetic polynucleotide
attaatggctttaaccttggccgctrttggccagcccggggccctcagttg

SEQ ID NO: 3207 - DNA, 51 bp, Artificial Sequence
  Synthetic polynucleotide
actctgagcgttagcagctttttcargcaggtatctcttcacattacagtg

SEQ ID NO: 3208 - DNA, 51 bp, Artificial Sequence
  Synthetic polynucleotide
tgccactgccatcggggaccctccaratgtcattattgtttccaaccaaga

SEQ ID NO: 3209 - DNA, 51 bp, Artificial Sequence
  Synthetic polynucleotide
atttccgtggcagccaactgcctctvtgcatatctccacatcccagcttct

SEQ ID NO: 3210 - DNA, 51 bp, Artificial Sequence
  Synthetic polynucleotide
actgttcatttttcttttaaatttarggtggtttgttggaaatgctccgac

SEQ ID NO: 3211 - DNA, 51 bp, Artificial Sequence
  Synthetic polynucleotide
tgtgacactttctgcctctctccgcrggaaacatggaccgtcaccactacg

SEQ ID NO: 3212 - DNA, 51 bp, Artificial Sequence
  Synthetic polynucleotide
ggcaggcagcccttctggacactgcrtgatcacaggagcagccctctggcc

SEQ ID NO: 3213 - DNA, 51 bp, Artificial Sequence
  Synthetic polynucleotide
ttttttttttttttttaaagaattcrgtagctttgttgtccggaccaacac

SEQ ID NO: 3214 - DNA, 51 bp, Artificial Sequence
  Synthetic polynucleotide
catcttttatttaacttaaatttcartcattttgcagtgatatggtttact

SEQ ID NO: 3215 - DNA, 51 bp, Artificial Sequence
  Synthetic polynucleotide
tctactgggtgaaggaatttatgccrgatacaattgtcgggatgctgtgtg

SEQ ID NO: 3216 - DNA, 51 bp, Artificial Sequence
  Synthetic polynucleotide
ttaagccgaaaccggggcaagacagrccgggtagcccggtattttgagtac

SEQ ID NO: 3217 - DNA, 51 bp, Artificial Sequence
  Synthetic polynucleotide
gctccagttttcttcagagaagaatrtatgctgaataatgctgttggtatg

SEQ ID NO: 3218 - DNA, 51 bp, Artificial Sequence
  Synthetic polynucleotide
ttttcttatttctgtattactagaaraccttcaagcttggttcagagagat

SEQ ID NO: 3219 - DNA, 51 bp, Artificial Sequence
  Synthetic polynucleotide
gagccctgccacttccccttccagtrccaccggcagctgtaccacaaatgt

SEQ ID NO: 3220 - DNA, 51 bp, Artificial Sequence
  Synthetic polynucleotide
ttcatccgccgggaaggcatccgccrgtacggcaagtgcctgcacgactgt

SEQ ID NO: 3221 - DNA, 51 bp, Artificial Sequence
  Synthetic polynucleotide
taaaagactggaaagacttgttcacraaggaaaaattgaccagtgctttaa

SEQ ID NO: 3222 - DNA, 51 bp, Artificial Sequence
  Synthetic polynucleotide
tgtcttaattttacctaatgtttgtrggttggaatacagatttggagaatt

SEQ ID NO: 3223 - DNA, 51 bp, Artificial Sequence
  Synthetic polynucleotide
catgagctccctgccctacatgaagrtgatctttcccctcatcatgatcgc

SEQ ID NO: 3224 - DNA, 51 bp, Artificial Sequence
  Synthetic polynucleotide
caggctgctcgtgttgctattgaacrcctggacaagatcagcgatagcgtc

SEQ ID NO: 3225 - DNA, 51 bp, Artificial Sequence
  Synthetic polynucleotide
cacctggccccagttgtaattgtgartatctcatacctatccctattggca

SEQ ID NO: 3226 - DNA, 51 bp, Artificial Sequence
  Synthetic polynucleotide
tattaaaacagttgtaactgtttatrggagacagaatcttccttggctgtt

SEQ ID NO: 3227 - DNA, 51 bp, Artificial Sequence
  Synthetic polynucleotide
tatcaggtttctttctcagtcacatdtgaaatggatcatggagaagcacat

SEQ ID NO: 3228 - DNA, 51 bp, Artificial Sequence
  Synthetic polynucleotide
gttgataatcatggttataacgttcragacatgacaacaacaagtattggt

SEQ ID NO: 3229 - DNA, 51 bp, Artificial Sequence
  Synthetic polynucleotide
tctggagttatgtggacactaatatrtgatactatttatgcccatcaggta

SEQ ID NO: 3230 - DNA, 51 bp, Artificial Sequence
  Synthetic polynucleotide
gcactgggtgttcttctgtgtctaarttactacaggtatattaaacgtttt

SEQ ID NO: 3231 - DNA, 51 bp, Artificial Sequence
  Synthetic polynucleotide
cacagcctactttccaagcggagccrtgtctggtaacggcaatgcggctgc

SEQ ID NO: 3232 - DNA, 51 bp, Artificial Sequence
  Synthetic polynucleotide
gagtaacaagctgacttacgggaccrtggtgtttgtcaggtccttccttgt

SEQ ID NO: 3233 - DNA, 51 bp, Artificial Sequence
  Synthetic polynucleotide
atccgatacagcgctgtgaggcaccrgtctgaaatcaagccagggtaagga

SEQ ID NO: 3234 - DNA, 51 bp, Artificial Sequence
  Synthetic polynucleotide
tgcttttttcccttttaaggcctcgrtccagctggacctaactttgagtat

SEQ ID NO: 3235 - DNA, 51 bp, Artificial Sequence
  Synthetic polynucleotide
tgcaacaatctgggctatgagatcartaaagtcagagccaaaagaagcagc

SEQ ID NO: 3236 - DNA, 51 bp, Artificial Sequence
  Synthetic polynucleotide
tacatcggccaattcttgcctggatrtgaggccccagcgttcatggacccc

SEQ ID NO: 3237 - DNA, 51 bp, Artificial Sequence
  Synthetic polynucleotide
cttcttgtcacaaatggcgctgacartgctcttagggtattatgattattg

SEQ ID NO: 3238 - DNA, 51 bp, Artificial Sequence
  Synthetic polynucleotide
ctcacaaacctggacttgagtatcarccagatagctcgtggattgtggatt

SEQ ID NO: 3239 - DNA, 51 bp, Artificial Sequence
  Synthetic polynucleotide
tgctggacgacccggagctccgacarggtcaggccagtgtgccgggcaggc

SEQ ID NO: 3240 - DNA, 51 bp, Artificial Sequence
  Synthetic polynucleotide
actggacataacagtggtgtcatacrtagtggaatttattataaacctgag

SEQ ID NO: 3241 - DNA, 51 bp, Artificial Sequence
  Synthetic polynucleotide
acatccagtggaggtgtcacaggcartgacgtcattatgcacttcacgctc

SEQ ID NO: 3242 - DNA, 51 bp, Artificial Sequence
  Synthetic polynucleotide
tttctttgtactgagccacatgacarggtaatatgcattttaaaatattgg

SEQ ID NO: 3243 - DNA, 51 bp, Artificial Sequence
  Synthetic polynucleotide
gccctggttcgggacgtggcgggggrattttacaagttcggactggaaggt

SEQ ID NO: 3244 - DNA, 51 bp, Artificial Sequence
  Synthetic polynucleotide
ttcatctgcaacacggccacagtctrtaagatctgtgcatggatgcagctg

SEQ ID NO: 3245 - DNA, 51 bp, Artificial Sequence
  Synthetic polynucleotide
ttcaaagaaatggagaacaggaggargaaacagctgctcagggatctctct

SEQ ID NO: 3246 - DNA, 51 bp, Artificial Sequence
  Synthetic polynucleotide
gttggaaaattatttcaagccttcartgcttgaagatccttgggctggcct

SEQ ID NO: 3247 - DNA, 51 bp, Artificial Sequence
  Synthetic polynucleotide
tgcccttgtccctccaggagatggtracctgcacctcaatgtgacggcgga

SEQ ID NO: 3248 - DNA, 51 bp, Artificial Sequence
  Synthetic polynucleotide
aacttgtgttttcatctctctctccrggtttccattctattatgaactaaa

SEQ ID NO: 3249 - DNA, 51 bp, Artificial Sequence
  Synthetic polynucleotide
acatgctttgatatattgttctttgrccctgccatcagagtcctcagagac

SEQ ID NO: 3250 - DNA, 51 bp, Artificial Sequence
  Synthetic polynucleotide
tgtggcctgtgcccaagtgcctaagdtaaccctcatcattgggggctccta

SEQ ID NO: 3251 - DNA, 51 bp, Artificial Sequence
  Synthetic polynucleotide
gcagatgtgtttccagatcgagaccrctttggccgtacattctataatcag

SEQ ID NO: 3252 - DNA, 51 bp, Artificial Sequence
  Synthetic polynucleotide
atcatccgactatatgaaatgccttrttttccaatgggattttggtcaaga

SEQ ID NO: 3253 - DNA, 51 bp, Artificial Sequence
  Synthetic polynucleotide
tgtgactagaaataaaatatcagggrtatgctcccccttgagactgaagga

SEQ ID NO: 3254 - DNA, 51 bp, Artificial Sequence
  Synthetic polynucleotide
ttcccaacccctttcttcccttcccrggggctgccgggaggctatcaaaag

SEQ ID NO: 3255 - DNA, 51 bp, Artificial Sequence
  Synthetic polynucleotide
atgaaggccaaagagggcgtggtgtdtgtggaggtgcggtacagtccgcac

SEQ ID NO: 3256 - DNA, 51 bp, Artificial Sequence
  Synthetic polynucleotide
tttagtaattgccccattgtccacartccccaactgggaaagggaattccg

SEQ ID NO: 3257 - DNA, 51 bp, Artificial Sequence
  Synthetic polynucleotide
tttgcctctttacagccatcccttcrtcatccttcaactaatcaaaatcaa

SEQ ID NO: 3258 - DNA, 51 bp, Artificial Sequence
  Synthetic polynucleotide
gtcccaggcaccggggtcaccacctrcgcagtgcacccaggcgtcgtccgc

SEQ ID NO: 3259 - DNA, 51 bp, Artificial Sequence
  Synthetic polynucleotide
tacccgatggtgctaaaaaagaaagragaatcgaaagaggaagacgagttg

SEQ ID NO: 3260 - DNA, 51 bp, Artificial Sequence
  Synthetic polynucleotide
gctttttttccccccttccctctagrtgatatgtttgttgaccttccattc

SEQ ID NO: 3261 - DNA, 51 bp, Artificial Sequence
  Synthetic polynucleotide
tattttcaggcctttttcttggtctrtgctctgggatgtttaagtatttac

SEQ ID NO: 3262 - DNA, 51 bp, Artificial Sequence
  Synthetic polynucleotide
aaaacagacgtgactatgctcttgtrtatagcagacaatctagcctgtttt

SEQ ID NO: 3263 - DNA, 51 bp, Artificial Sequence
  Synthetic polynucleotide
gtcatcttatctacttgctttcatcrgggaagtctgaccgtcccgctacag

SEQ ID NO: 3264 - DNA, 51 bp, Artificial Sequence
  Synthetic polynucleotide
cagctgttcgcgcgtcttctcctccrggtgtgcacgggagtgggaggcgtg

SEQ ID NO: 3265 - DNA, 51 bp, Artificial Sequence
  Synthetic polynucleotide
tatactctgaaagagcgatgcctccrggttgtccggagcctagtcaagcct

SEQ ID NO: 3266 - DNA, 51 bp, Artificial Sequence
  Synthetic polynucleotide
aattactatgttcgggccgtcctgcrtctcctgtgagtccccgtcccgcac

SEQ ID NO: 3267 - DNA, 51 bp, Artificial Sequence
  Synthetic polynucleotide
ttgtttgggctccaggtgcggcggcrgcacatggagcgttgtaccagcttc

SEQ ID NO: 3268 - DNA, 51 bp, Artificial Sequence
  Synthetic polynucleotide
gcagaagtcagatccacaaaagtgtyacatggaggtgctttgaattttatg

SEQ ID NO: 3269 - DNA, 51 bp, Artificial Sequence
  Synthetic polynucleotide
cagtccggcccgccctcctgcagccvtgtcccggcccctgtcagaccaaga

SEQ ID NO: 3270 - DNA, 51 bp, Artificial Sequence
  Synthetic polynucleotide
acttcacttctgttttatccctgtartgtttctgaagcatgcaggagaaag

SEQ ID NO: 3271 - DNA, 51 bp, Artificial Sequence
  Synthetic polynucleotide
ctgtgccagccttgtgccgtgcactrtgactttgtgggctcctatgagagg

SEQ ID NO: 3272 - DNA, 51 bp, Artificial Sequence
  Synthetic polynucleotide
aaaagttttgtattacgaattatacrgaagacaaatagcaactcagcctag

SEQ ID NO: 3273 - DNA, 51 bp, Artificial Sequence
  Synthetic polynucleotide
agcacgggaagcagcctgatgccccrgaagaaaaaccccgacagtttggag

SEQ ID NO: 3274 - DNA, 51 bp, Artificial Sequence
  Synthetic polynucleotide
caggctttcattactgctcagaatcrtggctatgccttggacaacaccctc

SEQ ID NO: 3275 - DNA, 51 bp, Artificial Sequence
  Synthetic polynucleotide
gaccatttccaacatggaggcagatrtgaatagactcctcaaggtgtggaa

SEQ ID NO: 3276 - DNA, 51 bp, Artificial Sequence
  Synthetic polynucleotide
catcacagggcagacatatacacgaraagtggatattgaagtactgtctgt

SEQ ID NO: 3277 - DNA, 51 bp, Artificial Sequence
  Synthetic polynucleotide
agccattgcttttctcattatccacrggccacttcttctgcagagccctgt

SEQ ID NO: 3278 - DNA, 51 bp, Artificial Sequence
  Synthetic polynucleotide
agcatgggagatgatttatctttcartctcaatggttaaggattgaggaag

SEQ ID NO: 3279 - DNA, 51 bp, Artificial Sequence
  Synthetic polynucleotide
gcacaagaaggaccacccggattacragtaccagccgcggcggaggaagtc

SEQ ID NO: 3280 - DNA, 51 bp, Artificial Sequence
  Synthetic polynucleotide
gtttactgccttcttaatgctttccrggaaccagatcctgaattgccagtg

SEQ ID NO: 3281 - DNA, 51 bp, Artificial Sequence
  Synthetic polynucleotide
gaatggctactgggtggtgataatgdtgaaggaaaatgagtaccaggcgtc

SEQ ID NO: 3282 - DNA, 51 bp, Artificial Sequence
  Synthetic polynucleotide
ggctactgggtggtgataatgatgadggaaaatgagtaccaggcgtccagc

SEQ ID NO: 3283 - DNA, 51 bp, Artificial Sequence
  Synthetic polynucleotide
gtgcacaaacagttctatttgttttrtaattttgaatattggtttttacct

SEQ ID NO: 3284 - DNA, 51 bp, Artificial Sequence
  Synthetic polynucleotide
tcaatgttccaggtctctggacactrtgggcacacgactcctcccagctct

SEQ ID NO: 3285 - DNA, 51 bp, Artificial Sequence
  Synthetic polynucleotide
tggccaactgtggatgcttcctattdtggtggtcgaggggttggaggaatt

SEQ ID NO: 3286 - DNA, 51 bp, Artificial Sequence
  Synthetic polynucleotide
tataaaattatagagaaagttgattrcccccgggatgaaaatggagaaatt

SEQ ID NO: 3287 - DNA, 51 bp, Artificial Sequence
  Synthetic polynucleotide
atctttggaggaacccatgggaatgrgctaaccggagtatttctggttaag

SEQ ID NO: 3288 - DNA, 51 bp, Artificial Sequence
  Synthetic polynucleotide
tggcattgtttctaagaacttcacaragaaaatccagtaagtaacctggag

SEQ ID NO: 3289 - DNA, 51 bp, Artificial Sequence
  Synthetic polynucleotide
cagtacctgatgagtgctggtgccarcatctccacctgggtctacagtagc

SEQ ID NO: 3290 - DNA, 51 bp, Artificial Sequence
  Synthetic polynucleotide
tgtccctcatgccggcctggattttytttttttttttttttgagggatggg

SEQ ID NO: 3291 - DNA, 51 bp, Artificial Sequence
  Synthetic polynucleotide
cgggtcacatggcccgcgggacaacrtggctgcgcccgcactagggctggt

SEQ ID NO: 3292 - DNA, 51 bp, Artificial Sequence
  Synthetic polynucleotide
ggccgcgggagccgcacgcggcgatrtggaagaggagggcaagaagggcaa

SEQ ID NO: 3293 - DNA, 51 bp, Artificial Sequence
  Synthetic polynucleotide
gactggattagtatcccactggtgtrtacacaggtgaggactaggctggtg

SEQ ID NO: 3294 - DNA, 51 bp, Artificial Sequence
  Synthetic polynucleotide
actcagtgtggacacctgtatgcctrcgactggattagtatcccactggtg

SEQ ID NO: 3295 - DNA, 51 bp, Artificial Sequence
  Synthetic polynucleotide
tgtaatgcaggtaatgaatttgggcrtcctgaatggttagacttcccaaga

SEQ ID NO: 3296 - DNA, 51 bp, Artificial Sequence
  Synthetic polynucleotide
ggtcttcttttcattttcaacttccrtccaagcaagagctacactgactac

SEQ ID NO: 3297 - DNA, 51 bp, Artificial Sequence
  Synthetic polynucleotide
cttctgccctgggccctgcttatcartgaatccaaatgggacctctggcta

SEQ ID NO: 3298 - DNA, 51 bp, Artificial Sequence
  Synthetic polynucleotide
gaagtgaaagaagcatacatgggtartgttctacaaggaggtgaaggacaa

SEQ ID NO: 3299 - DNA, 51 bp, Artificial Sequence
  Synthetic polynucleotide
catattacttcattgctggggcccartggagctgggaaaactactaccatg

SEQ ID NO: 3300 - DNA, 51 bp, Artificial Sequence
  Synthetic polynucleotide
aaggggcgtgccaagcgacgacgacrgcagcaggtgctgcccctggatccc

SEQ ID NO: 3301 - DNA, 51 bp, Artificial Sequence
  Synthetic polynucleotide
agtctgaacgctgtatccttggtcarcctggtgatggtgagtcctcataca

SEQ ID NO: 3302 - DNA, 51 bp, Artificial Sequence
  Synthetic polynucleotide
ccctccagtgtgttttatgtcttctrcgaacagtacctgaccatcattgac

SEQ ID NO: 3303 - DNA, 51 bp, Artificial Sequence
  Synthetic polynucleotide
ctccgcctcatctctctcaatatgartttttgttcccgtgagaacttctgg

SEQ ID NO: 3304 - DNA, 51 bp, Artificial Sequence
  Synthetic polynucleotide
tctgactgctaatgagaagagcaccrtgcaggaactcaattctcggctggc

SEQ ID NO: 3305 - DNA, 51 bp, Artificial Sequence
  Synthetic polynucleotide
gagaagagcaccatgcaggaactcadttctcggctggcctcttacttggat

SEQ ID NO: 3306 - DNA, 51 bp, Artificial Sequence
  Synthetic polynucleotide
acaggtctgacaacagagcccattcrtaaggaaagtggaccaggagaagaa

SEQ ID NO: 3307 - DNA, 51 bp, Artificial Sequence
  Synthetic polynucleotide
gaggaaatatatattctctgtaagartggccctagtaaattgccttaaaac

SEQ ID NO: 3308 - DNA, 51 bp, Artificial Sequence
  Synthetic polynucleotide
gctctcctgaaaagagccaaagaggragtaggtctccttagggaacataaa

SEQ ID NO: 3309 - DNA, 51 bp, Artificial Sequence
  Synthetic polynucleotide
tattaggtggaccacacaggagaatrtggaaatctggtgactatacagtca

SEQ ID NO: 3310 - DNA, 51 bp, Artificial Sequence
  Synthetic polynucleotide
gagggggtttgtgcctgataacgtartaacaccagtggagacttgcagatg

SEQ ID NO: 3311 - DNA, 51 bp, Artificial Sequence
  Synthetic polynucleotide
gccctggctggggccccactgcccartgtcaccttggatggctttgacctc

SEQ ID NO: 3312 - DNA, 51 bp, Artificial Sequence
  Synthetic polynucleotide
catcgtcctggtctgcctcatcttcrgcgtgctgtccaccatcgagcagta

SEQ ID NO: 3313 - DNA, 51 bp, Artificial Sequence
  Synthetic polynucleotide
gagttatcaagagatatgaatgcatrcatcaggccatctcctactagagga

SEQ ID NO: 3314 - DNA, 51 bp, Artificial Sequence
  Synthetic polynucleotide
agtctacacagcacaatgaccccccrtggacctgatgctgactgctttgag

SEQ ID NO: 3315 - DNA, 51 bp, Artificial Sequence
  Synthetic polynucleotide
agggggagggagtctacacagcacartgaccccccatggacctgatgctga

SEQ ID NO: 3316 - DNA, 51 bp, Artificial Sequence
  Synthetic polynucleotide
ctgagcttgaagatccaggagctcartggtcttgccctgccccagcatgag

SEQ ID NO: 3317 - DNA, 51 bp, Artificial Sequence
  Synthetic polynucleotide
gtaaaacttgatgtttttttcttctrtgaagaaactgatcacatgtggaat

SEQ ID NO: 3318 - DNA, 51 bp, Artificial Sequence
  Synthetic polynucleotide
gcttgagaagagcatggctgggaagyagtggtggaagtagaggacccggcc

SEQ ID NO: 3319 - DNA, 51 bp, Artificial Sequence
  Synthetic polynucleotide
ccaagtaacccctactgcgcctgctrcatgtctctcttccaggtgaacggc

SEQ ID NO: 3320 - DNA, 51 bp, Artificial Sequence
  Synthetic polynucleotide
cctggacttctggagggtgctgttcraggactacaacctggagcgctatgg

SEQ ID NO: 3321 - DNA, 51 bp, Artificial Sequence
  Synthetic polynucleotide
tcgtctgctagcgctcttcagatccrcgagcggactcacactggagagaag

SEQ ID NO: 3322 - DNA, 51 bp, Artificial Sequence
  Synthetic polynucleotide
cagttactggaggattctacctcagrtgaagataggagcagctccagttcc

SEQ ID NO: 3323 - DNA, 51 bp, Artificial Sequence
  Synthetic polynucleotide
ttccttgggctgcgagcttttcaccrccataggtaaatttttcaataaaag

SEQ ID NO: 3324 - DNA, 51 bp, Artificial Sequence
  Synthetic polynucleotide
cccaaagagttctaccacgaggtgcvcaggccctctcacttcctcaacttt

SEQ ID NO: 3325 - DNA, 51 bp, Artificial Sequence
  Synthetic polynucleotide
tctggccgcagcaatgccatgccacrtattaagacatatatgaggccttct

SEQ ID NO: 3326 - DNA, 51 bp, Artificial Sequence
  Synthetic polynucleotide
agccaggagaagatcttctgtggccrgatctggcctgtggatcagcagctc

SEQ ID NO: 3327 - DNA, 51 bp, Artificial Sequence
  Synthetic polynucleotide
accacaggtttgcctctctcctcacrgcccccagtccccagccagacctcc

SEQ ID NO: 3328 - DNA, 51 bp, Artificial Sequence
  Synthetic polynucleotide
cagtcagccaatgggcacctcgggcrccacttcaacaggtgagccactgct

SEQ ID NO: 3329 - DNA, 51 bp, Artificial Sequence
  Synthetic polynucleotide
tgtcagcgaaagttctcccggtccgrccacctgaagacccacaccaggact

SEQ ID NO: 3330 - DNA, 51 bp, Artificial Sequence
  Synthetic polynucleotide
ttgcagccacagcacagggtacgagrgcgataaccacacaacgcccatcct

SEQ ID NO: 3331 - DNA, 51 bp, Artificial Sequence
  Synthetic polynucleotide
ccaggcctccacttctacaccctcarccgcgagatggctaccacagaggtg

SEQ ID NO: 3332 - DNA, 51 bp, Artificial Sequence
  Synthetic polynucleotide
taactcattctagctagttcaacttycattgccatttcagccagcataaat

SEQ ID NO: 3333 - DNA, 51 bp, Artificial Sequence
  Synthetic polynucleotide
tattaatggtcagaagatgtggatarccaacggaggaaaagctaattggta

SEQ ID NO: 3334 - DNA, 51 bp, Artificial Sequence
  Synthetic polynucleotide
aggatcagaggctggggccaactggraccattggcagctgcacgctcatta

SEQ ID NO: 3335 - DNA, 51 bp, Artificial Sequence
  Synthetic polynucleotide
tgttctaacccccacccccactgccrggtaagggtgtcaggggctccagtg

SEQ ID NO: 3336 - DNA, 51 bp, Artificial Sequence
  Synthetic polynucleotide
gttgcacatcccggtgatggtgcggyatttgtcctgctccgggcaagtcac

SEQ ID NO: 3337 - DNA, 51 bp, Artificial Sequence
  Synthetic polynucleotide
ttggattttggggcaacgcgggaatrtgacagatccttcaccgacctctac

SEQ ID NO: 3338 - DNA, 51 bp, Artificial Sequence
  Synthetic polynucleotide
cacactggtgcagaacctggtcaacratggctacgtgcgggacgagactgt

SEQ ID NO: 3339 - DNA, 51 bp, Artificial Sequence
  Synthetic polynucleotide
ggctacttgcctgtggtcatcgatarcttccataatgccttccgtggtgag

SEQ ID NO: 3340 - DNA, 51 bp, Artificial Sequence
  Synthetic polynucleotide
ggcgagtcggtgcagaagcctctggrttattacagagttaacctgaccggg

SEQ ID NO: 3341 - DNA, 51 bp, Artificial Sequence
  Synthetic polynucleotide
aagggccacattgcagccttaaggargctgaaagaacagtgtggctgccgg

SEQ ID NO: 3342 - DNA, 51 bp, Artificial Sequence
  Synthetic polynucleotide
agcatcaactttgacaaccccgtctrtcagaagaccacagaggatgaggtc

SEQ ID NO: 3343 - DNA, 51 bp, Artificial Sequence
  Synthetic polynucleotide
attgcaccactcaacattgttttgtrtaatgtctttactcctcatggacct

SEQ ID NO: 3344 - DNA, 51 bp, Artificial Sequence
  Synthetic polynucleotide
tgaagattacgggggactcatttttrccagccccagagcagtggaagcagc

SEQ ID NO: 3345 - DNA, 51 bp, Artificial Sequence
  Synthetic polynucleotide
gaatgctgtccaccgtggagcggggrcaggagtccctgtggccagctttca

SEQ ID NO: 3346 - DNA, 51 bp, Artificial Sequence
  Synthetic polynucleotide
agaccttgtgaggactagaggaagartgctcctggctgttttgtactgcct

SEQ ID NO: 3347 - DNA, 51 bp, Artificial Sequence
  Synthetic polynucleotide
gtcgccatggtgggggatggggtcadtgactccccggccttggcccaggca

SEQ ID NO: 3348 - DNA, 51 bp, Artificial Sequence
  Synthetic polynucleotide
ctccgagaggggagaccagcgggccvtgacaagctccaggctttggttttc

SEQ ID NO: 3349 - DNA, 51 bp, Artificial Sequence
  Synthetic polynucleotide
aataaattgaacgtgttccactggcrtctggtagatgatccttccttccca

SEQ ID NO: 3350 - DNA, 51 bp, Artificial Sequence
  Synthetic polynucleotide
cagcccgtaacccttctggacatctrtacacactggcaacagtaagtggtg

SEQ ID NO: 3351 - DNA, 51 bp, Artificial Sequence
  Synthetic polynucleotide
atgctttttttccacctaatcccctrgagtggtgtcttaactgtcaaactg

SEQ ID NO: 3352 - DNA, 51 bp, Artificial Sequence
  Synthetic polynucleotide
gcctagcagctgtccaaagtacaccyggtggtcagcaggatgcaggcccag

SEQ ID NO: 3353 - DNA, 51 bp, Artificial Sequence
  Synthetic polynucleotide
taattctaatggaattaagcctgtcrtggaacaatatggtctcatccctga

SEQ ID NO: 3354 - DNA, 51 bp, Artificial Sequence
  Synthetic polynucleotide
acttcttaccaaacttaacggcaccrtaaccacccctggctggcccaagga

SEQ ID NO: 3355 - DNA, 51 bp, Artificial Sequence
  Synthetic polynucleotide
ggaaatgtatgccattggcttttgtratatcatcccttccttcttccactg

SEQ ID NO: 3356 - DNA, 51 bp, Artificial Sequence
  Synthetic polynucleotide
cctgtccacaatgcctgtcttgtacrtgatcgtgtccctcccaccatcttt

SEQ ID NO: 3357 - DNA, 51 bp, Artificial Sequence
  Synthetic polynucleotide
gaagcaaggtgtggacgtcaaggccrtgacctctaatgtggccagtgtgca

SEQ ID NO: 3358 - DNA, 51 bp, Artificial Sequence
  Synthetic polynucleotide
aacgttccgtttctaacttttattarcaaattggaccgaatgggctccaac

SEQ ID NO: 3359 - DNA, 51 bp, Artificial Sequence
  Synthetic polynucleotide
gtgggcgacacgcccgcctacctctrcgaggagcgctggacgcccccctgc

SEQ ID NO: 3360 - DNA, 51 bp, Artificial Sequence
  Synthetic polynucleotide
tgccggcttcgtggcgcaggcgcctracaactaccgccgcttcctggagct

SEQ ID NO: 3361 - DNA, 51 bp, Artificial Sequence
  Synthetic polynucleotide
tccttttcctctacagggctccgagragggtgcagtgaggcccacagcctt

SEQ ID NO: 3362 - DNA, 51 bp, Artificial Sequence
  Synthetic polynucleotide
ccagccgaccacatggtacaggaggbtctagggtaaggacaaaggcaaaga

SEQ ID NO: 3363 - DNA, 51 bp, Artificial Sequence
  Synthetic polynucleotide
acatcacccacttggctcaagaccartggagcggtgaatgggaaggggtca

SEQ ID NO: 3364 - DNA, 51 bp, Artificial Sequence
  Synthetic polynucleotide
aaatatgttcatggcattgctgtacrttggtacctggactttctggctcca

SEQ ID NO: 3365 - DNA, 51 bp, Artificial Sequence
  Synthetic polynucleotide
gtgaatttgtccaaagcaggtattgrgacaactgtcatgactgatgctgcc

SEQ ID NO: 3366 - DNA, 51 bp, Artificial Sequence
  Synthetic polynucleotide
ctacagaacgtcagaaaacacatccrttcctgtttcaccaacatttcctgt

SEQ ID NO: 3367 - DNA, 51 bp, Artificial Sequence
  Synthetic polynucleotide
gaagctattccgaggggtgaagaagrtgggtggggaagaatttagccggcg

SEQ ID NO: 3368 - DNA, 51 bp, Artificial Sequence
  Synthetic polynucleotide
ttctggtctgaccgtcgcaaccctcrtgaagtacaaccagcatatgctaca

SEQ ID NO: 3369 - DNA, 51 bp, Artificial Sequence
  Synthetic polynucleotide
gtcaccgcctccaccacccaggggtrtgtccgcttcgagggaggcgccggg

SEQ ID NO: 3370 - DNA, 51 bp, Artificial Sequence
  Synthetic polynucleotide
ctgcagatccagcccagccagctggrattgttctactgtttgtacgagatg

SEQ ID NO: 3371 - DNA, 51 bp, Artificial Sequence
  Synthetic polynucleotide
cttattgacgttactttttgctcctrgacaaagtggctacgagctataagc

SEQ ID NO: 3372 - DNA, 51 bp, Artificial Sequence
  Synthetic polynucleotide
gataaatacccaaaggcccgttaccrttggctggtcttaccgtggacctcc

SEQ ID NO: 3373 - DNA, 51 bp, Artificial Sequence
  Synthetic polynucleotide
catcccaatgtcaaagttgtgtccarttttatggattttgatgaaactgta

SEQ ID NO: 3374 - DNA, 51 bp, Artificial Sequence
  Synthetic polynucleotide
ccggcagccgccgccagccgcagccrtgggccgggcccggccgggccaacg

SEQ ID NO: 3375 - DNA, 51 bp, Artificial Sequence
  Synthetic polynucleotide
tcactctgctccttccctgttgccartgtctcgctgactaagggtggacgt

SEQ ID NO: 3376 - DNA, 51 bp, Artificial Sequence
  Synthetic polynucleotide
ggtatattttgaacccaaagacatcrctgctgaagaagaagaggaagaagt

SEQ ID NO: 3377 - DNA, 51 bp, Artificial Sequence
  Synthetic polynucleotide
tgccttggtgattcagaccatcatgrctgtgattgtagtagatcagagagg

SEQ ID NO: 3378 - DNA, 51 bp, Artificial Sequence
  Synthetic polynucleotide
tatcccatatttatctggaccagatraaaacctgaccagtgcagaggtaag

SEQ ID NO: 3379 - DNA, 51 bp, Artificial Sequence
  Synthetic polynucleotide
cagacagctgactgcctggttaatgytgagaagagaaacatcagattccag

SEQ ID NO: 3380 - DNA, 51 bp, Artificial Sequence
  Synthetic polynucleotide
tttatgagaaattcttttatgttttrgataaatgcctgtagtcattatggc

SEQ ID NO: 3381 - DNA, 51 bp, Artificial Sequence
  Synthetic polynucleotide
tgaccttcggtcctgggaagccgccvagttgtttgcacgaaaactgaaccc

SEQ ID NO: 3382 - DNA, 51 bp, Artificial Sequence
  Synthetic polynucleotide
acaatgcaacatgcagtctacgtctrtgacatttgtcatgtgatcatcgac

SEQ ID NO: 3383 - DNA, 51 bp, Artificial Sequence
  Synthetic polynucleotide
acctgcccccaggtctggttccagarccgcagagccaagtggcggaagcgc

SEQ ID NO: 3384 - DNA, 51 bp, Artificial Sequence
  Synthetic polynucleotide
ttccaggacagtgttcataaaaatcrtcgttacaaggtaagaaaatataac

SEQ ID NO: 3385 - DNA, 51 bp, Artificial Sequence
  Synthetic polynucleotide
ctagtcctgaacccatcagcaataarcgtgagttcacacgagcttcgcgca

SEQ ID NO: 3386 - DNA, 51 bp, Artificial Sequence
  Synthetic polynucleotide
cctggaataaacttgaagaaaatacrttatgatagcatcaaactttatgag

SEQ ID NO: 3387 - DNA, 51 bp, Artificial Sequence
  Synthetic polynucleotide
gcttacttgcagagcattacccctcrggggtactctgactcggaggagagg

SEQ ID NO: 3388 - DNA, 51 bp, Artificial Sequence
  Synthetic polynucleotide
gttgtcatccagtctcttccttaggrattcattgcctttgggatcagcaac

SEQ ID NO: 3389 - DNA, 51 bp, Artificial Sequence
  Synthetic polynucleotide
ttatgctattgcagtgtcagtaggaraagtatatgccaccaagtatgatta

SEQ ID NO: 3390 - DNA, 51 bp, Artificial Sequence
  Synthetic polynucleotide
aaggacacattctttttgacggtccrtgatgctatactctatctacagaac

SEQ ID NO: 3391 - DNA, 51 bp, Artificial Sequence
  Synthetic polynucleotide
tttttaacatcttttgttttatttcrgacgataattgctactgccatttca

SEQ ID NO: 3392 - DNA, 51 bp, Artificial Sequence
  Synthetic polynucleotide
gaccccatatgctgtctcgactgcartgacaaagtatctaaatacaaatgt

SEQ ID NO: 3393 - DNA, 51 bp, Artificial Sequence
  Synthetic polynucleotide
ttgttttgcttctttctgccagtcarcaatgtcggaatgcttccaaacctt

SEQ ID NO: 3394 - DNA, 51 bp, Artificial Sequence
  Synthetic polynucleotide
gttttgatcttagtgtttattacagraaatgaagccatatctcactaacta

SEQ ID NO: 3395 - DNA, 51 bp, Artificial Sequence
  Synthetic polynucleotide
ctaaataaacattttccttatcaggrttcagagaagatgtgcattgaaatt

SEQ ID NO: 3396 - DNA, 51 bp, Artificial Sequence
  Synthetic polynucleotide
ctgcatgcgctggtggccattgctgrcaacacccgtgagaacaccaagttt

SEQ ID NO: 3397 - DNA, 51 bp, Artificial Sequence
  Synthetic polynucleotide
ttaaaaaaagttgcagctactttgcragtgccagtaaatgatttaaatgca

SEQ ID NO: 3398 - DNA, 51 bp, Artificial Sequence
  Synthetic polynucleotide
tggcgcaccccatcagaccatctacrgtgagtagggcttcaggctgggaag

SEQ ID NO: 3399 - DNA, 51 bp, Artificial Sequence
  Synthetic polynucleotide
gggctgtatcgaattgtgggtgtcavctccagagtgcagaagttgctgagt

SEQ ID NO: 3400 - DNA, 51 bp, Artificial Sequence
  Synthetic polynucleotide
cgctcctacagccacgtggtgctcarggaggtgcgcttcttcaacctgcag

SEQ ID NO: 3401 - DNA, 51 bp, Artificial Sequence
  Synthetic polynucleotide
tgcgacatggacgtgtttgatgcctrtctgccttggcgccgcaacctgtcc

SEQ ID NO: 3402 - DNA, 51 bp, Artificial Sequence
  Synthetic polynucleotide
cttgaaactgaatggaagaataactrtcctcgcctgcgggaacttgaccgg

SEQ ID NO: 3403 - DNA, 51 bp, Artificial Sequence
  Synthetic polynucleotide
agtatcttcactcccagtccttgtaraattccacctccgacgagagtgggc

SEQ ID NO: 3404 - DNA, 51 bp, Artificial Sequence
  Synthetic polynucleotide
ccgcgccggggtgcaaatagccatcrtgaccttcaaaggtgcgaaagggcc

SEQ ID NO: 3405 - DNA, 51 bp, Artificial Sequence
  Synthetic polynucleotide
acaggccctccccttctctgcccacrgtacctggcgttgcctgacgtgtca

SEQ ID NO: 3406 - DNA, 51 bp, Artificial Sequence
  Synthetic polynucleotide
aggaactcctgcaataacttcatctrtggaggctgccggggcaataagaac

SEQ ID NO: 3407 - DNA, 51 bp, Artificial Sequence
  Synthetic polynucleotide
gggagggctggggtttctcagggtcrgggggtccccaaggagtagccaggg

SEQ ID NO: 3408 - DNA, 51 bp, Artificial Sequence
  Synthetic polynucleotide
aggggccaggcttggccaggagggasatcaggcctgggtcttgccttcact

SEQ ID NO: 3409 - DNA, 51 bp, Artificial Sequence
  Synthetic polynucleotide
gggcaggagagcacagacacggagcrggcccctggcaaggacactttctac

SEQ ID NO: 3410 - DNA, 51 bp, Artificial Sequence
  Synthetic polynucleotide
agcctggacattaccttccgctccgrctactccaacgagaagcygttcacg

SEQ ID NO: 3411 - DNA, 51 bp, Artificial Sequence
  Synthetic polynucleotide
gctctgcctcccatagaccccctggrtcaccgggatgctggagatctctgg

SEQ ID NO: 3412 - DNA, 51 bp, Artificial Sequence
  Synthetic polynucleotide
agcactacagagcagttggggtatgrtgggcatgttagccagccagcagaa

SEQ ID NO: 3413 - DNA, 51 bp, Artificial Sequence
  Synthetic polynucleotide
gtaatgtcacagcgacatatgatagrtggacgatggtgtgactgcaaactt

SEQ ID NO: 3414 - DNA, 51 bp, Artificial Sequence
  Synthetic polynucleotide
ggtatgatgggcatgttagccagccrgcagaaccagtcaggcccatcgggt

SEQ ID NO: 3415 - DNA, 51 bp, Artificial Sequence
  Synthetic polynucleotide
cgttcatatatccaatgccgaacctragcacaatagcaatagacagttaga

SEQ ID NO: 3416 - DNA, 51 bp, Artificial Sequence
  Synthetic polynucleotide
atcaacagtaacctgaaatttgcagrggttagtgatactcacctgtggtat

SEQ ID NO: 3417 - DNA, 51 bp, Artificial Sequence
  Synthetic polynucleotide
aatcaactctgggctggcctgggctrctattctcgtggccggcggctgcag

SEQ ID NO: 3418 - DNA, 51 bp, Artificial Sequence
  Synthetic polynucleotide
tccgtgacctgggagccctcagagcrgcttcagcgcaaggccctgctgcag

SEQ ID NO: 3419 - DNA, 51 bp, Artificial Sequence
  Synthetic polynucleotide
ttgaaaagaattgtaacatcatgctrtggcccctcaggtaggctgaagcag

SEQ ID NO: 3420 - DNA, 51 bp, Artificial Sequence
  Synthetic polynucleotide
tggctttggaggttacgtgtgtacarcctcacagtcctcagctctgctcag

SEQ ID NO: 3421 - DNA, 51 bp, Artificial Sequence
  Synthetic polynucleotide
gtgcagcccgtggtcaccctgtaccrctgggacctgccccagcgcctgcag

SEQ ID NO: 3422 - DNA, 51 bp, Artificial Sequence
  Synthetic polynucleotide
cttttcttttttttgccctgcctggrtacctaccacaaggttgaccttcgt

SEQ ID NO: 3423 - DNA, 51 bp, Artificial Sequence
  Synthetic polynucleotide
cacctcctgactaaagcgctccaccbaagaagataaggaaaatagatatat

SEQ ID NO: 3424 - DNA, 51 bp, Artificial Sequence
  Synthetic polynucleotide
gaagtatctttgttttcattcacccrggaatgcattcacagaggaggattc

SEQ ID NO: 3425 - DNA, 51 bp, Artificial Sequence
  Synthetic polynucleotide
gctactgcaatcacaatccaaagggrttggattgttgttgttgcaggagaa

SEQ ID NO: 3426 - DNA, 51 bp, Artificial Sequence
  Synthetic polynucleotide
cgtgaacacggcccggcccgacgagraggccataatgacctatgtgtccag

SEQ ID NO: 3427 - DNA, 51 bp, Artificial Sequence
  Synthetic polynucleotide
caaatggggtcatgaagccattgaartgcacagctcttatttccacattgc

SEQ ID NO: 3428 - DNA, 51 bp, Artificial Sequence
  Synthetic polynucleotide
gttttcctaccctgagcgccccatcrtatttctcagtatgtgctataatat

SEQ ID NO: 3429 - DNA, 51 bp, Artificial Sequence
  Synthetic polynucleotide
agtgtttttttccagagaaagctgaytgttaccagcaagacattcttctaa

SEQ ID NO: 3430 - DNA, 51 bp, Artificial Sequence
  Synthetic polynucleotide
cagggtgttacatttccagccatgcrtgccatgtggtcttcttgggctccc

SEQ ID NO: 3431 - DNA, 51 bp, Artificial Sequence
  Synthetic polynucleotide
atgggcctccactaggggaggccatdaggagcgccccacagtcatgctgtt

SEQ ID NO: 3432 - DNA, 51 bp, Artificial Sequence
  Synthetic polynucleotide
agagttgaacaaaaggcaggggtgaytgcacagttttttaagagctcctat

SEQ ID NO: 3433 - DNA, 51 bp, Artificial Sequence
  Synthetic polynucleotide
taagtgcctgacttttatgttttacrgaactaaaaccagaacaggtgaaga

SEQ ID NO: 3434 - DNA, 51 bp, Artificial Sequence
  Synthetic polynucleotide
agtcttatacttgtatttcctctagrtgaagttgatagccttttgtgtgaa

SEQ ID NO: 3435 - DNA, 51 bp, Artificial Sequence
  Synthetic polynucleotide
tgcaagtttaacttcaaaatacgtgrgtgctctgtttccaatattgtcgta

SEQ ID NO: 3436 - DNA, 51 bp, Artificial Sequence
  Synthetic polynucleotide
ctgttactctttggtccacctgggartgggaagacaatgctggtaagggtt

SEQ ID NO: 3437 - DNA, 51 bp, Artificial Sequence
  Synthetic polynucleotide
agaatcgaatgcaaccttctttaatrtaagtgctgcaagtttaacttcaaa

SEQ ID NO: 3438 - DNA, 51 bp, Artificial Sequence
  Synthetic polynucleotide
acacctggatgtggacaacgaccgarccacacccagcgacctggacagcac

SEQ ID NO: 3439 - DNA, 51 bp, Artificial Sequence
  Synthetic polynucleotide
tgcccaattttttactgcttacaagrtattatgcgagtctgtagtgaatcc

SEQ ID NO: 3440 - DNA, 51 bp, Artificial Sequence
  Synthetic polynucleotide
ccaggaaacatcgtgggaatcggccrgtgcctgctgcatggcatgacggtg

SEQ ID NO: 3441 - DNA, 51 bp, Artificial Sequence
  Synthetic polynucleotide
ggaggcctgatcactctctcttcttrcaacaaattccacaacaactgctac

SEQ ID NO: 3442 - DNA, 51 bp, Artificial Sequence
  Synthetic polynucleotide
gacactctaattgtcacctgcaccarcagtgccacaagcatctttgccggc

SEQ ID NO: 3443 - DNA, 51 bp, Artificial Sequence
  Synthetic polynucleotide
gcgttttacaatggactctgggcctrtgatggatggtgaggtgtcctgaga

SEQ ID NO: 3444 - DNA, 51 bp, Artificial Sequence
  Synthetic polynucleotide
gagcctgtgtgtgtcgggcagctgcrgggtaggcgtgtgtggacattggcg

SEQ ID NO: 3445 - DNA, 51 bp, Artificial Sequence
  Synthetic polynucleotide
tgtatttggagctacctctagtatcraaagtggtttagatttgaatacaag

SEQ ID NO: 3446 - DNA, 51 bp, Artificial Sequence
  Synthetic polynucleotide
tccttccctgaccccaggggcctctrccacttctgcctctactggaaccga

SEQ ID NO: 3447 - DNA, 51 bp, Artificial Sequence
  Synthetic polynucleotide
aggaactgagcccttctttaagcagraaagtctgcttctaaagcagaaaca

SEQ ID NO: 3448 - DNA, 51 bp, Artificial Sequence
  Synthetic polynucleotide
catctccttcctcatcgtggtcaacrtgtacatcgccatcatcctggagaa

SEQ ID NO: 3449 - DNA, 51 bp, Artificial Sequence
  Synthetic polynucleotide
cgccctcctaggcgccatcccctccrtcatgaatgtgctgcttgtctgcct

SEQ ID NO: 3450 - DNA, 51 bp, Artificial Sequence
  Synthetic polynucleotide
gttcagcatgttcatcatgatcaccrtcttgaccaactgcgtattcatgac

SEQ ID NO: 3451 - DNA, 51 bp, Artificial Sequence
  Synthetic polynucleotide
cctgactgccacaggtgtacaggaarcatttgtcttttgttgctggaaagc

SEQ ID NO: 3452 - DNA, 51 bp, Artificial Sequence
  Synthetic polynucleotide
cagtgcagagcagcacctgatatccrtgtgtgaggaccatgatcgcatcct

SEQ ID NO: 3453 - DNA, 51 bp, Artificial Sequence
  Synthetic polynucleotide
cctctctccggtccgtgcctccaagdtggtgagtcttcttgcgtggtgagg

SEQ ID NO: 3454 - DNA, 51 bp, Artificial Sequence
  Synthetic polynucleotide
tcaaactaagaagctctccacctccrgtaacaatgatgacaaaattaatgg

SEQ ID NO: 3455 - DNA, 51 bp, Artificial Sequence
  Synthetic polynucleotide
gatgaggaagaagaatgtccatcagrggaaacagacatcatctccaaagga

SEQ ID NO: 3456 - DNA, 51 bp, Artificial Sequence
  Synthetic polynucleotide
aaagtgtttatctcagtctgagcggrcgaccacgtctcccaaaaggctgct

SEQ ID NO: 3457 - DNA, 51 bp, Artificial Sequence
  Synthetic polynucleotide
tctggctcccccttctcctgcctgcrggtcagcatcacggtgatcgaggcc

SEQ ID NO: 3458 - DNA, 51 bp, Artificial Sequence
  Synthetic polynucleotide
gctcgagtgtttcgatcctctccccrgtttggtgttaccttggtcacttat

SEQ ID NO: 3459 - DNA, 51 bp, Artificial Sequence
  Synthetic polynucleotide
aatgccctacagttggcagtggccartgagcatctggaaattacagaactt

SEQ ID NO: 3460 - DNA, 51 bp, Artificial Sequence
  Synthetic polynucleotide
tttggaatttatccagtgatcaggtrttgtgcaaagagctagtgaaccttt

SEQ ID NO: 3461 - DNA, 51 bp, Artificial Sequence
  Synthetic polynucleotide
gggcaatttaggaaccttttttattrccaatgtgagaattgtgtggcatgc

SEQ ID NO: 3462 - DNA, 51 bp, Artificial Sequence
  Synthetic polynucleotide
ccacagtacccgtactcagcacctcrgtgtcgagacttcgtaccttcagca

SEQ ID NO: 3463 - DNA, 51 bp, Artificial Sequence
  Synthetic polynucleotide
ggcattccggcgccattacatgatcrcactggaagtccctgctcgagacag

SEQ ID NO: 3464 - DNA, 51 bp, Artificial Sequence
  Synthetic polynucleotide
tgccttttcctccacggacaaatgcrgaccctggaccaagtaagtaacaac

SEQ ID NO: 3465 - DNA, 51 bp, Artificial Sequence
  Synthetic polynucleotide
tgccacggggtgtcaggctcctgtgrggtaaagacgtgctggcgagccgtg

SEQ ID NO: 3466 - DNA, 51 bp, Artificial Sequence
  Synthetic polynucleotide
gctggcactgccgggcaaggcagagrgtgtggcgtcgctcaccagccagtg

SEQ ID NO: 3467 - DNA, 51 bp, Artificial Sequence
  Synthetic polynucleotide
tagggcacgaccaatcaaatacacargaaaaggcgttgtagttcctatctc

SEQ ID NO: 3468 - DNA, 51 bp, Artificial Sequence
  Synthetic polynucleotide
ggaagctggcaaacagctgcccttcrtctatggggacattcctcccggcat

SEQ ID NO: 3469 - DNA, 51 bp, Artificial Sequence
  Synthetic polynucleotide
gcaatgttgcctcccccaggacctcrgagctttgtccatttcacaaaacag

SEQ ID NO: 3470 - DNA, 51 bp, Artificial Sequence
  Synthetic polynucleotide
gcctgtggataatgcacgagaagccrtgcagcaggcagatgactggctggg

SEQ ID NO: 3471 - DNA, 51 bp, Artificial Sequence
  Synthetic polynucleotide
gtaggcatgggccagatctccaactrtgtggcagcatttgtcctgggtatg

SEQ ID NO: 3472 - DNA, 51 bp, Artificial Sequence
  Synthetic polynucleotide
ccgcagtacaacccaggggacaaagrtaccaaaattgccaagaggatggct

SEQ ID NO: 3473 - DNA, 51 bp, Artificial Sequence
  Synthetic polynucleotide
tctcttctctctgttggttgtaggargctgtacaacaatggctttacttca

SEQ ID NO: 3474 - DNA, 51 bp, Artificial Sequence
  Synthetic polynucleotide
ggagacactggcaccctatatccccrtggacggggaagacttccagctaag

SEQ ID NO: 3475 - DNA, 51 bp, Artificial Sequence
  Synthetic polynucleotide
gttcagcctcatcttcaagctcatcrttgagttcctcttcctctacctgct

SEQ ID NO: 3476 - DNA, 51 bp, Artificial Sequence
  Synthetic polynucleotide
atgccgcgcctggtgcagtgtgccadcgtggccccctgccccaacatcgtg

SEQ ID NO: 3477 - DNA, 51 bp, Artificial Sequence
  Synthetic polynucleotide
tgtttttttgcttttgtaggttgccrtgggtcaaggtcaagctgatttagc

SEQ ID NO: 3478 - DNA, 51 bp, Artificial Sequence
  Synthetic polynucleotide
cgcatgccacctgatgtaattagagrtattcttgaaggagttttaaggttg

SEQ ID NO: 3479 - DNA, 51 bp, Artificial Sequence
  Synthetic polynucleotide
gttgacccatctctgttcccttcacrggtaagggggcttacgtgtagaagc

SEQ ID NO: 3480 - DNA, 51 bp, Artificial Sequence
  Synthetic polynucleotide
tggtccaagtggtgctggaaaatcarcgctttggagaatgttaagggctgc

SEQ ID NO: 3481 - DNA, 51 bp, Artificial Sequence
  Synthetic polynucleotide
gtggcctttttgagactaaatcacarcaaactgtcagatgagggtctccca

SEQ ID NO: 3482 - DNA, 51 bp, Artificial Sequence
  Synthetic polynucleotide
tatccgcgccatgcctgtctacaaaraagctgagcacgtcacggaggtggt

SEQ ID NO: 3483 - DNA, 51 bp, Artificial Sequence
  Synthetic polynucleotide
cggatctgtgcttgcccaggaagagrcaggaaggcggatgaagatagcatc

SEQ ID NO: 3484 - DNA, 51 bp, Artificial Sequence
  Synthetic polynucleotide
gatctgtgcttgcccaggaagagacrggaaggcggatgaagatagcatcag

SEQ ID NO: 3485 - DNA, 51 bp, Artificial Sequence
  Synthetic polynucleotide
agaacagtggctgcttttggtggtgrgaaaagagaggttgaaaggttggtt

SEQ ID NO: 3486 - DNA, 51 bp, Artificial Sequence
  Synthetic polynucleotide
ggacctcacgtacccagtcacctccrtgttcactgggtctgcctttaaccg

SEQ ID NO: 3487 - DNA, 51 bp, Artificial Sequence
  Synthetic polynucleotide
gtacaccacggggacgatgggcaccygcaggcagggagacgcacagctgag

SEQ ID NO: 3488 - DNA, 51 bp, Artificial Sequence
  Synthetic polynucleotide
aagtctcggatctttcagaacctcarcggggctttaggtgaggaggaagac

SEQ ID NO: 3489 - DNA, 51 bp, Artificial Sequence
  Synthetic polynucleotide
gcatacttagactactacctcgatgrtattattgacttatttaattgtttg

SEQ ID NO: 3490 - DNA, 51 bp, Artificial Sequence
  Synthetic polynucleotide
gggccaggtgcaggagacatcaaggrtcctggatgaggtgagctgggcgtg

SEQ ID NO: 3491 - DNA, 51 bp, Artificial Sequence
  Synthetic polynucleotide
cttttttgtcttctctctggggcagrggctggcaggatcccaaacccacac

SEQ ID NO: 3492 - DNA, 51 bp, Artificial Sequence
  Synthetic polynucleotide
cagctcttaaccactccagccactcrctctggcacctctgttttttccctt

SEQ ID NO: 3493 - DNA, 51 bp, Artificial Sequence
  Synthetic polynucleotide
aacttgtcccctccctgtgtcttctrgctgtgcagcaagatcttggagaag

SEQ ID NO: 3494 - DNA, 51 bp, Artificial Sequence
  Synthetic polynucleotide
cgctgcggctggattcccatccagtrccccatcatttccgagtgcaagtgc

SEQ ID NO: 3495 - DNA, 51 bp, Artificial Sequence
  Synthetic polynucleotide
gatacaatttttttctttctcttttrggccttgaatgtcccatgcagttcc

SEQ ID NO: 3496 - DNA, 51 bp, Artificial Sequence
  Synthetic polynucleotide
aggggattatatgggagtccaccccrtgggtctcttctggtctctgaaacc

SEQ ID NO: 3497 - DNA, 51 bp, Artificial Sequence
  Synthetic polynucleotide
tttggctttcctgtgcactacacagrcgtgtccaacatgggccgtggtgcc

SEQ ID NO: 3498 - DNA, 51 bp, Artificial Sequence
  Synthetic polynucleotide
gctgcttctgtcttgcaggccatctrcgtgattgacttcttctggaacgaa

SEQ ID NO: 3499 - DNA, 51 bp, Artificial Sequence
  Synthetic polynucleotide
aaggttctctttcttgcagggcccartggctgcaaaatcgcaacccaacat

SEQ ID NO: 3500 - DNA, 51 bp, Artificial Sequence
  Synthetic polynucleotide
tatcatcagagcatgtcacagatctrtggactcattcatggtgacctgtaa

SEQ ID NO: 3501 - DNA, 51 bp, Artificial Sequence
  Synthetic polynucleotide
gtgctggacgaggcaaagaatatcarcaagtcactgtcagctctgggcaat

SEQ ID NO: 3502 - DNA, 51 bp, Artificial Sequence
  Synthetic polynucleotide
gtctccttcctcccccagaaaagctrtgttccatatcgtgacagcaaaatg

SEQ ID NO: 3503 - DNA, 51 bp, Artificial Sequence
  Synthetic polynucleotide
ttttgtccaggcttgagtcaccatgrgtagtagtttaggaaaagaaaaaga

SEQ ID NO: 3504 - DNA, 51 bp, Artificial Sequence
  Synthetic polynucleotide
tactccttgatcaaaaataaaatccrcagattgcccgttattgaccctatc

SEQ ID NO: 3505 - DNA, 51 bp, Artificial Sequence
  Synthetic polynucleotide
gtcctgcttttctctttgcaggtccrtcggctggtggtggtaaatgaagca

SEQ ID NO: 3506 - DNA, 51 bp, Artificial Sequence
  Synthetic polynucleotide
ttaaaatttgtatacgtgtaatgcarcattcagaggattgctgcatttaga

SEQ ID NO: 3507 - DNA, 51 bp, Artificial Sequence
  Synthetic polynucleotide
ggccttggacaagttgttactgactrtgttcatggggatgccttgcagaaa

SEQ ID NO: 3508 - DNA, 51 bp, Artificial Sequence
  Synthetic polynucleotide
gaatggtgtggagtgcagcacatacrcttgtcaccgagccaccattgtatg

SEQ ID NO: 3509 - DNA, 51 bp, Artificial Sequence
  Synthetic polynucleotide
atgaccttgagccctcaggaacgagdtggcggttctctggaggctgagtgc

SEQ ID NO: 3510 - DNA, 51 bp, Artificial Sequence
  Synthetic polynucleotide
tcagtaaaatattctggctttacaaytggacgtccacaaatgagtgcacat

SEQ ID NO: 3511 - DNA, 51 bp, Artificial Sequence
  Synthetic polynucleotide
ttcctgtacagctgggccaaacccarccctagggaggccactgtctcctaa

SEQ ID NO: 3512 - DNA, 51 bp, Artificial Sequence
  Synthetic polynucleotide
cttatacttttcctagaagaggatcrctacttagccccagacttttaccat

SEQ ID NO: 3513 - DNA, 51 bp, Artificial Sequence
  Synthetic polynucleotide
gaaaacttggaaatccacagagcacratatgggtctagccttgacccggaa

SEQ ID NO: 3514 - DNA, 51 bp, Artificial Sequence
  Synthetic polynucleotide
cagtccaatggcacgcatatcatgtrtaaaaacacactctggatcgaaagc

SEQ ID NO: 3515 - DNA, 51 bp, Artificial Sequence
  Synthetic polynucleotide
ggtattgtctttgcatgtatttcctrgggatgtcctttaactccattgcct

SEQ ID NO: 3516 - DNA, 51 bp, Artificial Sequence
  Synthetic polynucleotide
gagatttttctttccaaagcaattcrcaagtccttcctagaggttaatgaa

SEQ ID NO: 3517 - DNA, 51 bp, Artificial Sequence
  Synthetic polynucleotide
agacggttttcggaaggtggtgagcrtcgagcagggcggcctgcttaggcc

SEQ ID NO: 3518 - DNA, 51 bp, Artificial Sequence
  Synthetic polynucleotide
gtttactgttctgattttcatgctgraagagcagcgagagagaaaattcat

SEQ ID NO: 3519 - DNA, 51 bp, Artificial Sequence
  Synthetic polynucleotide
gtgattatcaccagcaccagttcgtrttatgtgttttacatttacgtggga

SEQ ID NO: 3520 - DNA, 51 bp, Artificial Sequence
  Synthetic polynucleotide
ctcaataagtcctggccagagggtgrgatttgaacactgcttgctttgtta

SEQ ID NO: 3521 - DNA, 51 bp, Artificial Sequence
  Synthetic polynucleotide
actgagtggaggtcaacgagcaagartttctttagcaaggtgaataactaa

SEQ ID NO: 3522 - DNA, 51 bp, Artificial Sequence
  Synthetic polynucleotide
ttactgggaagaatcatagcttcctrtgacccggataacaaggaggaacgc

SEQ ID NO: 3523 - DNA, 51 bp, Artificial Sequence
  Synthetic polynucleotide
tggaatctttttatatttaggggtarggatctcatttgtacattcattatg

SEQ ID NO: 3524 - DNA, 51 bp, Artificial Sequence
  Synthetic polynucleotide
ctgttccacaaagctctgaatttacrtactgccaactggttcttgtacctg

SEQ ID NO: 3525 - DNA, 51 bp, Artificial Sequence
  Synthetic polynucleotide
  misc_feature (26)..(26): n is a, c, g, t or u
catattagagaacatttccttctcantaagtcctggccagagggtgagatt

SEQ ID NO: 3526 - DNA, 51 bp, Artificial Sequence
  Synthetic polynucleotide
gcactcctcatggggctaatctgggrgttgttacaggcgtctgccttctgt

SEQ ID NO: 3527 - DNA, 51 bp, Artificial Sequence
  Synthetic polynucleotide
cctccaccctcaggagaaagagaagragtacatgctgcctctggacaacct

SEQ ID NO: 3528 - DNA, 51 bp, Artificial Sequence
  Synthetic polynucleotide
tctcagaccccaatcctaagccctcrggaggttgtgtcttgtagccagtat

SEQ ID NO: 3529 - DNA, 51 bp, Artificial Sequence
  Synthetic polynucleotide
aatcatgctgttctgcttgtgggctrtggcactgactcagcctctgggatg

SEQ ID NO: 3530 - DNA, 51 bp, Artificial Sequence
  Synthetic polynucleotide
cgttattactcctctgagtaccactrtgtaggaggtttctatggaggctgc

SEQ ID NO: 3531 - DNA, 51 bp, Artificial Sequence
  Synthetic polynucleotide
tccgacccctccaacctgcggccctrgagcgcccccgccgccccgggggaa

SEQ ID NO: 3532 - DNA, 51 bp, Artificial Sequence
  Synthetic polynucleotide
accaccattggctacggggacaagtrcccccagacctggaacggcaggctc

SEQ ID NO: 3533 - DNA, 51 bp, Artificial Sequence
  Synthetic polynucleotide
gccctgagctggggcctccgtgaagdctactcccggggcggctactgcatg

SEQ ID NO: 3534 - DNA, 51 bp, Artificial Sequence
  Synthetic polynucleotide
agaacgttattatccagagtataccyaaaggagaaaaagaatcccaaaata

SEQ ID NO: 3535 - DNA, 51 bp, Artificial Sequence
  Synthetic polynucleotide
ggagaaggagcagatcaagtccctcvacagcaggttcgcggccttcatcga

SEQ ID NO: 3536 - DNA, 51 bp, Artificial Sequence
  Synthetic polynucleotide
tctaatggcgaaaaaaaatttcaacrcaaatctgctggaatagatagaaaa

SEQ ID NO: 3537 - DNA, 51 bp, Artificial Sequence
  Synthetic polynucleotide
tttgatgtctttcctgatggatgggrcaagagatactgtctgcgacatgtg

SEQ ID NO: 3538 - DNA, 51 bp, Artificial Sequence
  Synthetic polynucleotide
tcttttgctttctaaacacttttcartgtttttaggtgtatagtgttgatt

SEQ ID NO: 3539 - DNA, 51 bp, Artificial Sequence
  Synthetic polynucleotide
ctcatcgtagccaccattgctgtcargtacactcagtctaactctgtgtgc

SEQ ID NO: 3540 - DNA, 51 bp, Artificial Sequence
  Synthetic polynucleotide
gatgacaatcatgttgcagcaattcrctgtaaagctggaaagggacgaact

SEQ ID NO: 3541 - DNA, 51 bp, Artificial Sequence
  Synthetic polynucleotide
gttgcacaatatccttttgaagaccrtaacccaccacagctagaacttatc

SEQ ID NO: 3542 - DNA, 51 bp, Artificial Sequence
  Synthetic polynucleotide
cctcagccgttacctgtgtgtggtgrtatcaaagtagagttcttccacaaa

SEQ ID NO: 3543 - DNA, 51 bp, Artificial Sequence
  Synthetic polynucleotide
tccttgtcccgagaatcttccttacrgtaccattcaggaatggggactgtg

SEQ ID NO: 3544 - DNA, 51 bp, Artificial Sequence
  Synthetic polynucleotide
agaaactatgcaaaatcttaatgatrgattagcttcctacctggataaggt

SEQ ID NO: 3545 - DNA, 51 bp, Artificial Sequence
  Synthetic polynucleotide
tgagagaataattcaaaggtttggargaaaagtggtgtatgttgttatagg

SEQ ID NO: 3546 - DNA, 51 bp, Artificial Sequence
  Synthetic polynucleotide
gtgtactcggggagcctctatttccrgggcgctgagtccagaactgtcata

SEQ ID NO: 3547 - DNA, 51 bp, Artificial Sequence
  Synthetic polynucleotide
acaaacctgggagacaaacatccgtragcagtcagtcgccaatgccttcat

SEQ ID NO: 3548 - DNA, 51 bp, Artificial Sequence
  Synthetic polynucleotide
gaccctcaagctggcggccaggtacrtcgacttcctctaccaggtcctcca

SEQ ID NO: 3549 - DNA, 51 bp, Artificial Sequence
  Synthetic polynucleotide
acagatcaccgtcctgctgggccacracggtgccgggaagaccaccaccct

SEQ ID NO: 3550 - DNA, 51 bp, Artificial Sequence
  Synthetic polynucleotide
attcctcagaggccatgtggccccarctggcagcgacagctgcagacgggc

SEQ ID NO: 3551 - DNA, 51 bp, Artificial Sequence
  Synthetic polynucleotide
aacgaacccacgtactgtctgtgcarccaggtctcctatggggagatgatc

SEQ ID NO: 3552 - DNA, 51 bp, Artificial Sequence
  Synthetic polynucleotide
gattttgaacgaactcttaaaggacrtacagactctgtacaggacatttca

SEQ ID NO: 3553 - DNA, 51 bp, Artificial Sequence
  Synthetic polynucleotide
tacggggagagtggagaaaaaggggrcacagggttaatgtgaagtccagga

SEQ ID NO: 3554 - DNA, 51 bp, Artificial Sequence
  Synthetic polynucleotide
actttacgacctacacaggagtttcrgtaacgtgaagtatgtcatgttgga

SEQ ID NO: 3555 - DNA, 51 bp, Artificial Sequence
  Synthetic polynucleotide
tctgctgctgcaataagataaaaaayccactaacacaactagcccggatta

SEQ ID NO: 3556 - DNA, 51 bp, Artificial Sequence
  Synthetic polynucleotide
atctgggacggcgaggagaccagctrctgcttcaaggagaagtcgaggggt

SEQ ID NO: 3557 - DNA, 51 bp, Artificial Sequence
  Synthetic polynucleotide
agaagacgcacacataacttttgctrtattggatgcagtaaatggaaatat

SEQ ID NO: 3558 - DNA, 51 bp, Artificial Sequence
  Synthetic polynucleotide
ccgcccagctgctgcgtgcccaccarattgactcccatcagcattctatac

SEQ ID NO: 3559 - DNA, 51 bp, Artificial Sequence
  Synthetic polynucleotide
accccccatcacaccccacgagtacvtgctctcgctgtacaggacgctgtc

SEQ ID NO: 3560 - DNA, 51 bp, Artificial Sequence
  Synthetic polynucleotide
cgagagaagctgaccatcatcccccrggtgagctctagaacttactcgggc

SEQ ID NO: 3561 - DNA, 51 bp, Artificial Sequence
  Synthetic polynucleotide
acctggccagcttccccaagatgtgrctccagccagccaaatccatcctgc

SEQ ID NO: 3562 - DNA, 51 bp, Artificial Sequence
  Synthetic polynucleotide
aacgtcttcaacatcctcatcgtctrcatgctattcatgttcatcttcgcc

SEQ ID NO: 3563 - DNA, 51 bp, Artificial Sequence
  Synthetic polynucleotide
caagagaaggaaagaaacatatttgrccagcgtgccatagagaatgagcta

SEQ ID NO: 3564 - DNA, 51 bp, Artificial Sequence
  Synthetic polynucleotide
acgctcaaccgcttagcaggcaaacrgatgatccaagtcgtgaagtgggca

SEQ ID NO: 3565 - DNA, 51 bp, Artificial Sequence
  Synthetic polynucleotide
atcagcgaccagctgcccaaggtggrgtcggggaacgccaagccgctctac

SEQ ID NO: 3566 - DNA, 51 bp, Artificial Sequence
  Synthetic polynucleotide
ccaggtagaggtatcacacccaactrtgaagatcagcatcctgctcatgtt

SEQ ID NO: 3567 - DNA, 51 bp, Artificial Sequence
  Synthetic polynucleotide
caaggcaaagaggaaagaaattatcrtatcttttataggttgtgtgctggt

SEQ ID NO: 3568 - DNA, 51 bp, Artificial Sequence
  Synthetic polynucleotide
cgccagcaacaagtacggcctggccrcagagggcacacggcatacgctgac

SEQ ID NO: 3569 - DNA, 51 bp, Artificial Sequence
  Synthetic polynucleotide
tggagtatgaacttcaatacaaagargtaaatgaaactaaatggaaaatgg

SEQ ID NO: 3570 - DNA, 51 bp, Artificial Sequence
  Synthetic polynucleotide
atcatgcttggctgcatcttcatgargactgcccaagcccaccgcagggct

SEQ ID NO: 3571 - DNA, 51 bp, Artificial Sequence
  Synthetic polynucleotide
ctggtggccccgctgatcatctaccrtgtcattgatgccaacagcccactc

SEQ ID NO: 3572 - DNA, 51 bp, Artificial Sequence
  Synthetic polynucleotide
gaaaaaaactgcaaattaaatgagayacctttgaattgggagagttaattc

SEQ ID NO: 3573 - DNA, 51 bp, Artificial Sequence
  Synthetic polynucleotide
ggcaaggcattcagccagagctccarcctcatcacccacagccgcaaacac

SEQ ID NO: 3574 - DNA, 51 bp, Artificial Sequence
  Synthetic polynucleotide
cccttcggctgcgacctctgtgggargggtttccagaggaaggtggacctc

SEQ ID NO: 3575 - DNA, 51 bp, Artificial Sequence
  Synthetic polynucleotide
tgccatcaagcttgaatgtgtcaaarccaaacaccctcagctccacattga

SEQ ID NO: 3576 - DNA, 51 bp, Artificial Sequence
  Synthetic polynucleotide
aaacagaaaggacattgctcaggaartgctcatgaaccaaaccaaagccac

SEQ ID NO: 3577 - DNA, 51 bp, Artificial Sequence
  Synthetic polynucleotide
tgaaacaacccatccttatttcaacrgaaagaggacttgccagacccacgc

SEQ ID NO: 3578 - DNA, 51 bp, Artificial Sequence
  Synthetic polynucleotide
tgctatgggcgcagatatggccccaragggatcgggtatggacaaggcgct

SEQ ID NO: 3579 - DNA, 51 bp, Artificial Sequence
  Synthetic polynucleotide
gtgaactatcaagatggcaacctcarcatttcaattccagtgtttagtatt

SEQ ID NO: 3580 - DNA, 51 bp, Artificial Sequence
  Synthetic polynucleotide
ttggaatctcagaatgcacaaaaagraagtgacgcatgtggccctgaaccc

SEQ ID NO: 3581 - DNA, 51 bp, Artificial Sequence
  Synthetic polynucleotide
aaggagacaatcgaagactgttgggrccaggatgcagaggctcggcttact

SEQ ID NO: 3582 - DNA, 51 bp, Artificial Sequence
  Synthetic polynucleotide
acagagaaggcacttccttcggccarccctggaactgaattcggtgagttt

SEQ ID NO: 3583 - DNA, 51 bp, Artificial Sequence
  Synthetic polynucleotide
ctacctcatcatgatcagtgcgctcrtggccctagtgttcatcaagtacct

SEQ ID NO: 3584 - DNA, 51 bp, Artificial Sequence
  Synthetic polynucleotide
ccagacatcatcttcaaggacgaggrgaacacaggcgccgaccgcctcatg

SEQ ID NO: 3585 - DNA, 51 bp, Artificial Sequence
  Synthetic polynucleotide
acttctctctggcttcttttttaggrcgtggagaacagcttcttcttgaat

SEQ ID NO: 3586 - DNA, 51 bp, Artificial Sequence
  Synthetic polynucleotide
gcgaccaatcgggcccaagccaaccraggcagggaaagataagtctaaagc

SEQ ID NO: 3587 - DNA, 51 bp, Artificial Sequence
  Synthetic polynucleotide
tctccccctccaccaggtggtggtartcttggaatgaacagtaggaaacca

SEQ ID NO: 3588 - DNA, 51 bp, Artificial Sequence
  Synthetic polynucleotide
tacctggtcaatgcgtatcccctggrtatgtcccagtattttcggcttttc

SEQ ID NO: 3589 - DNA, 51 bp, Artificial Sequence
  Synthetic polynucleotide
tttttaggaccctggtttgatatgtrcctatctgctcgagactccgttgtt

SEQ ID NO: 3590 - DNA, 51 bp, Artificial Sequence
  Synthetic polynucleotide
tcgccgggcccatgaagcgggagachgtaagcgacaaacgcacagcgtcgg

SEQ ID NO: 3591 - DNA, 51 bp, Artificial Sequence
  Synthetic polynucleotide
aacttcgtgaacttcggcgtcggggrcttgaatgcggttcagagccccggg

SEQ ID NO: 3592 - DNA, 51 bp, Artificial Sequence
  Synthetic polynucleotide
gctgaaactcacgtccacgcaggtcragatctggttccagaaccggcgcta

SEQ ID NO: 3593 - DNA, 51 bp, Artificial Sequence
  Synthetic polynucleotide
gtgcgccgcgcccaggacttcgtgtrccacctgcactgctttgcctgcgtc

SEQ ID NO: 3594 - DNA, 51 bp, Artificial Sequence
  Synthetic polynucleotide
cttgtactttttttcccctttaactrggaattgtggtgcttggaataaaca

SEQ ID NO: 3595 - DNA, 51 bp, Artificial Sequence
  Synthetic polynucleotide
acatatttaatattttgtttttcttrgaccattccaacaaaagacagactt

SEQ ID NO: 3596 - DNA, 51 bp, Artificial Sequence
  Synthetic polynucleotide
atgtgtgtttcacgtaggtggtttgrcaagtcgttcacgtttgttgtcttc

SEQ ID NO: 3597 - DNA, 51 bp, Artificial Sequence
  Synthetic polynucleotide
cggctgctgaagccccgggagatggrgcagcagatgcagaggatcctggac

SEQ ID NO: 3598 - DNA, 51 bp, Artificial Sequence
  Synthetic polynucleotide
tccattgacagcctccagctgggctrtgcggaggatgggcactgcaaaggc

SEQ ID NO: 3599 - DNA, 51 bp, Artificial Sequence
  Synthetic polynucleotide
caccctgcgctcacgcctctccatcrtcctgcaggaccccgtcctcttcag

SEQ ID NO: 3600 - DNA, 51 bp, Artificial Sequence
  Synthetic polynucleotide
acatggcttcatttccctgggcacarcctgcggtggatcctgaccttcatg

SEQ ID NO: 3601 - DNA, 51 bp, Artificial Sequence
  Synthetic polynucleotide
tctcagaaagaacttgccatcatccrtggacctcctggcactgggaaaacc

SEQ ID NO: 3602 - DNA, 51 bp, Artificial Sequence
  Synthetic polynucleotide
gaagcacgtgcaggtcctggccaacragcgcatcaacgccatggcagagga

SEQ ID NO: 3603 - DNA, 51 bp, Artificial Sequence
  Synthetic polynucleotide
tcccgggacgtgtacagcactgactrctacagggtgagtagctgtgcagat

SEQ ID NO: 3604 - DNA, 51 bp, Artificial Sequence
  Synthetic polynucleotide
tcagaagcatttttctccctctttcrggctgttatcaaagaacagcttcaa

SEQ ID NO: 3605 - DNA, 51 bp, Artificial Sequence
  Synthetic polynucleotide
aagctccgctggtacttcaagctctrtgatgtagatggcaacggctgcatt

SEQ ID NO: 3606 - DNA, 51 bp, Artificial Sequence
  Synthetic polynucleotide
ttaatttcatggtacatgagtggctrtcatactggctattatatggtaagt

SEQ ID NO: 3607 - DNA, 51 bp, Artificial Sequence
  Synthetic polynucleotide
tcttgatgatgctgatgctttgggargtatgttaatttcatggtacatgag

SEQ ID NO: 3608 - DNA, 51 bp, Artificial Sequence
  Synthetic polynucleotide
cgggacaactgtcccacggtgcctarcagtgcccaggaggactcagaccac

SEQ ID NO: 3609 - DNA, 51 bp, Artificial Sequence
  Synthetic polynucleotide
ggtgatgcctgcgacgacgacgacgrcaatgacggagtccctgacagtcgg

SEQ ID NO: 3610 - DNA, 51 bp, Artificial Sequence
  Synthetic polynucleotide
gatattgtagaccgagcaaaaatggragataccctgaagaggaggtttttc

SEQ ID NO: 3611 - DNA, 51 bp, Artificial Sequence
  Synthetic polynucleotide
ggcatagataccaccaatgcctgctrcggtggtactgcctccctcttcaat

SEQ ID NO: 3612 - DNA, 51 bp, Artificial Sequence
  Synthetic polynucleotide
cgaggtgtacagaaaatgaacagcaraactgtgaccagcacaatgttgggt

SEQ ID NO: 3613 - DNA, 51 bp, Artificial Sequence
  Synthetic polynucleotide
atctgcaggcaagagtttcaccttgrccataaccgtcttcacaaatcctcc

SEQ ID NO: 3614 - DNA, 51 bp, Artificial Sequence
  Synthetic polynucleotide
agagcgtgagcagatcaaaactctcdacaacaaatttgcctccttcattga

SEQ ID NO: 3615 - DNA, 51 bp, Artificial Sequence
  Synthetic polynucleotide
gatgccagcacccaagtcctgctgtrcaggattcggtaggaagtgcccccc

SEQ ID NO: 3616 - DNA, 51 bp, Artificial Sequence
  Synthetic polynucleotide
ctctgtccacttgaggtggtggtcartgccctggtgggcgccatcccgtcc

SEQ ID NO: 3617 - DNA, 51 bp, Artificial Sequence
  Synthetic polynucleotide
agtgaggacgacttcgatatgttctrtgagatctgggagaaatttgaccca

SEQ ID NO: 3618 - DNA, 51 bp, Artificial Sequence
  Synthetic polynucleotide
aaggactttctgcacaaggaccgggrtgacgtcaatgtggagatcgttttt

SEQ ID NO: 3619 - DNA, 51 bp, Artificial Sequence
  Synthetic polynucleotide
tataatcgcaagacatcccgagtctrtaagttttgcagtaagcttgcagag

SEQ ID NO: 3620 - DNA, 51 bp, Artificial Sequence
  Synthetic polynucleotide
ggccccctgctgccataccaagccgrgttcctggtgcgcagccacgatgcg

SEQ ID NO: 3621 - DNA, 51 bp, Artificial Sequence
  Synthetic polynucleotide
ggagaaaaagaagaaaatgttaaaargaacagatacaaggacatactgcca

SEQ ID NO: 3622 - DNA, 51 bp, Artificial Sequence
  Synthetic polynucleotide
ggggagctgtctgaggactccagcartgtggtccaactcattaagaatgct

SEQ ID NO: 3623 - DNA, 51 bp, Artificial Sequence
  Synthetic polynucleotide
gtctgggggggcttcgcctacttgcrggatgtggtggagcaggcaatcatc

SEQ ID NO: 3624 - DNA, 51 bp, Artificial Sequence
  Synthetic polynucleotide
cagatcacctccttcctgggccacartggagcggggaagacgaccaccatg

SEQ ID NO: 3625 - DNA, 51 bp, Artificial Sequence
  Synthetic polynucleotide
ctcggagctggtaaaaagaggcctarcccctgtctttagatttacagtcca

SEQ ID NO: 3626 - DNA, 51 bp, Artificial Sequence
  Synthetic polynucleotide
aagaacccgtatacataaaatctagvcaaaaaaggaaggaatcgaaccccc

SEQ ID NO: 3627 - DNA, 51 bp, Artificial Sequence
  Synthetic polynucleotide
accttttaagttaaagattaagagarccaacacctctttacagtgaaatgc

SEQ ID NO: 3628 - DNA, 51 bp, Artificial Sequence
  Synthetic polynucleotide
accccctctaccccctctagagcccrctgtaaagctaacttagcattaacc

SEQ ID NO: 3629 - DNA, 51 bp, Artificial Sequence
  Synthetic polynucleotide
tcttaggccccaaaaattttggtgcractccaaataaaagtaataaccatg

SEQ ID NO: 3630 - DNA, 51 bp, Artificial Sequence
  Synthetic polynucleotide
agaacagggtttgttaagatggcagrgcccggtaatcgcataaaacttaaa

SEQ ID NO: 3631 - DNA, 51 bp, Artificial Sequence
  Synthetic polynucleotide
tttgttaagatggcagagcccggtartcgcataaaacttaaaactttacag

SEQ ID NO: 3632 - DNA, 51 bp, Artificial Sequence
  Synthetic polynucleotide
gtttgttaagatggcagagcccggtratcgcataaaacttaaaactttaca

SEQ ID NO: 3633 - DNA, 51 bp, Artificial Sequence
  Synthetic polynucleotide
gatggcagagcccggtaatcgcataraacttaaaactttacagtcagaggt

SEQ ID NO: 3634 - DNA, 51 bp, Artificial Sequence
  Synthetic polynucleotide
gtaatcgcataaaacttaaaactttrcagtcagaggttcaattcctcttct

SEQ ID NO: 3635 - DNA, 51 bp, Artificial Sequence
  Synthetic polynucleotide
gatagagtaaataataggagcttaarcccccttatttctaggactatgaga

SEQ ID NO: 3636 - DNA, 51 bp, Artificial Sequence
  Synthetic polynucleotide
gcattccccctcaaacctaagaaatrtgtctgataaaagagttactttgat

SEQ ID NO: 3637 - DNA, 51 bp, Artificial Sequence
  Synthetic polynucleotide
tgtctgataaaagagttactttgatrgagtaaataataggagcttaaaccc

SEQ ID NO: 3638 - DNA, 51 bp, Artificial Sequence
  Synthetic polynucleotide
gataaaagagttactttgatagagtraataataggagcttaaaccccctta

SEQ ID NO: 3639 - DNA, 51 bp, Artificial Sequence
  Synthetic polynucleotide
cttccaattaactagttttgacaacrttcaaaaaagagtaataaacttcgc

SEQ ID NO: 3640 - DNA, 51 bp, Artificial Sequence
  Synthetic polynucleotide
tccatgactttttcaaaaaggtattrgaaaaaccatttcataactttgtca

SEQ ID NO: 3641 - DNA, 51 bp, Artificial Sequence
  Synthetic polynucleotide
agtttaaacaaaacgaatgatttcgrctcattaaattatgataatcatatt

SEQ ID NO: 3642 - DNA, 51 bp, Artificial Sequence
  Synthetic polynucleotide
acccctacgcatttatatagaggagrcaagtcgtaacatggtaagtgtact

SEQ ID NO: 3643 - DNA, 51 bp, Artificial Sequence
  Synthetic polynucleotide
  misc_feature (26)..(26): n is a, c, g, t or u
cacccccacgggaaacagcagtgatnarcctttagcaataaacgaaagttt

SEQ ID NO: 3644 - DNA, 51 bp, Artificial Sequence
  Synthetic polynucleotide
cccgaatgatatttcctattcgcctrcacaattctccgatccgtccctaac

SEQ ID NO: 3645 - DNA, 51 bp, Artificial Sequence
  Synthetic polynucleotide
tccaaagacaaccatcattccccctraataaattaaaaaaactattaaacc

SEQ ID NO: 3646 - DNA, 51 bp, Artificial Sequence
  Synthetic polynucleotide
ctattccaactgttcatcggctgagrgggcgtaggaattatatccttcttg

SEQ ID NO: 3647 - DNA, 51 bp, Artificial Sequence
  Synthetic polynucleotide
ctccctacaaatctccttaattatarcattcacagccacagaactaatcat

SEQ ID NO: 3648 - DNA, 51 bp, Artificial Sequence
  Synthetic polynucleotide
taccgaacgaaaaattctaggctatrtacaactacgcaaaggccccaacgt

SEQ ID NO: 3649 - DNA, 51 bp, Artificial Sequence
  Synthetic polynucleotide
ctgttcttatgaattcgaacagcatrcccccgattccgctacgaccaactc

SEQ ID NO: 3650 - DNA, 51 bp, Artificial Sequence
  Synthetic polynucleotide
  misc_feature (26)..(26): n is a, c, g, t or u
ccgtttactcaatcctctgatcaggntgagcatcaaactcaaactacgccc

SEQ ID NO: 3651 - DNA, 51 bp, Artificial Sequence
  Synthetic polynucleotide
aataagtggctcctttaacctctccdcccttatcacaacacaagaacacct

SEQ ID NO: 3652 - DNA, 51 bp, Artificial Sequence
  Synthetic polynucleotide
  misc_feature (26)..(26): n is a, c, g, t or u
acccccttgaccttgccgaaggggantccgaactagtctcaggcttcaaca

SEQ ID NO: 3653 - DNA, 51 bp, Artificial Sequence
  Synthetic polynucleotide
  misc_feature (26)..(26): n is a, c, g, t or u
cgaatacgccgcaggccccttcgccntattcttcatagccgaatacacaaa

SEQ ID NO: 3654 - DNA, 51 bp, Artificial Sequence
  Synthetic polynucleotide
  misc_feature (26)..(26): n is a, c, g, t or u
attttgtcaccaagaccctacttctnacctccctgttcttatgaattcgaa

SEQ ID NO: 3655 - DNA, 51 bp, Artificial Sequence
  Synthetic polynucleotide
aatgaatccacatatccgggtgacargccaccagaaccgtgtgggtcctga

SEQ ID NO: 3656 - DNA, 51 bp, Artificial Sequence
  Synthetic polynucleotide
gatcaaaaggatttgcccactgggcytaaaatacaaagaaaagagaggtgt

SEQ ID NO: 3657 - DNA, 51 bp, Artificial Sequence
  Synthetic polynucleotide
accaatgtcaactccaggatgctctrcttcgcccctgatctggttttcaat

SEQ ID NO: 3658 - DNA, 51 bp, Artificial Sequence
  Synthetic polynucleotide
ccggatgtacagccagtgtgtccgartgaggcacctctctcaagagtttgg

SEQ ID NO: 3659 - DNA, 51 bp, Artificial Sequence
  Synthetic polynucleotide
gattgcgagagagctgcatcagttcrcttttgacctgctaatcaagtcaca

SEQ ID NO: 3660 - DNA, 51 bp, Artificial Sequence
  Synthetic polynucleotide
atgatggcagagatcatctctgtgcragtgcccaagatcctttctgggaaa

SEQ ID NO: 3661 - DNA, 51 bp, Artificial Sequence
  Synthetic polynucleotide
ccaatctcagccaagcttgttgcaartatgctatctgtagcaggtgcagat

SEQ ID NO: 3662 - DNA, 51 bp, Artificial Sequence
  Synthetic polynucleotide
cttgactataatgaatacttcagggrtttgaatgtaagtaattgcttcttt

SEQ ID NO: 3663 - DNA, 51 bp, Artificial Sequence
  Synthetic polynucleotide
tgtaggactgaacgtcttgctcgagrtgtgatgaaggagatgggaggccat

SEQ ID NO: 3664 - DNA, 51 bp, Artificial Sequence
  Synthetic polynucleotide
cctgaagtgcactcaatattcctcgraggtcacacatttcttgtgaggaac

SEQ ID NO: 3665 - DNA, 51 bp, Artificial Sequence
  Synthetic polynucleotide
gctgcagtggagaggctctgggattrtgggatgagtagctccccacatgtt

SEQ ID NO: 3666 - DNA, 51 bp, Artificial Sequence
  Synthetic polynucleotide
ttctctgtgtccttctccagcaatcratggctacataatggatacactacc

SEQ ID NO: 3667 - DNA, 51 bp, Artificial Sequence
  Synthetic polynucleotide
tacagtggtcattacacttaagaacrtggcttcccatcctgtcagtcttca

SEQ ID NO: 3668 - DNA, 51 bp, Artificial Sequence
  Synthetic polynucleotide
tttcttcctgctataggagctgaatrtgatgatcagaccagtcaaagggag

SEQ ID NO: 3669 - DNA, 51 bp, Artificial Sequence
  Synthetic polynucleotide
cctgctataggagctgaatatgatgrtcagaccagtcaaagggagaaagaa

SEQ ID NO: 3670 - DNA, 51 bp, Artificial Sequence
  Synthetic polynucleotide
ggaaatctcgccaataactttccttrctgctcaaacactcttgatggacct

SEQ ID NO: 3671 - DNA, 51 bp, Artificial Sequence
  Synthetic polynucleotide
tgggtacattacattgctgctgaagrggaggactgggactatgctccctta

SEQ ID NO: 3672 - DNA, 51 bp, Artificial Sequence
  Synthetic polynucleotide
cagcggattggtaggaagtacaaaaragtccgatttatggcatacacagat

SEQ ID NO: 3673 - DNA, 51 bp, Artificial Sequence
  Synthetic polynucleotide
tcaggaatcttgggacctttactttrtggggaagttggagacacactgttg

SEQ ID NO: 3674 - DNA, 51 bp, Artificial Sequence
  Synthetic polynucleotide
tcggtgcctgacccgctattactctrgtttcgttaatatggagagagatct

SEQ ID NO: 3675 - DNA, 51 bp, Artificial Sequence
  Synthetic polynucleotide
tctagtttcgttaatatggagagagrtctagcttcaggactcattggccct

SEQ ID NO: 3676 - DNA, 51 bp, Artificial Sequence
  Synthetic polynucleotide
gaggatccagagttccaagcctccarcatcatgcacagtgagtaaagcagc

SEQ ID NO: 3677 - DNA, 51 bp, Artificial Sequence
  Synthetic polynucleotide
ttccctccctaggaaaaagatgtgcrctcaggcctgattggaccccttctg

SEQ ID NO: 3678 - DNA, 51 bp, Artificial Sequence
  Synthetic polynucleotide
tctctgtgtccttctccagcaatcartggctacataatggatacactacct

SEQ ID NO: 3679 - DNA, 51 bp, Artificial Sequence
  Synthetic polynucleotide
agcacactttttctggtgtacagcartagtgagtagcaatgtgggcagagg

SEQ ID NO: 3680 - DNA, 51 bp, Artificial Sequence
  Synthetic polynucleotide
aagtgttattttaattggtaggtggrtctgttggcaccaatgattattcac

SEQ ID NO: 3681 - DNA, 51 bp, Artificial Sequence
  Synthetic polynucleotide
tacatctctcagtttatcatcatgtrtagtcttgatgggaagaagtggcag

SEQ ID NO: 3682 - DNA, 51 bp, Artificial Sequence
  Synthetic polynucleotide
atgaaagtcacaggagtaactactcrgggagtaaaatctctgcttaccagc

SEQ ID NO: 3683 - DNA, 51 bp, Artificial Sequence
  Synthetic polynucleotide
ggtgcagtggaactgtcatgggactrtatgcaaagtgatctcggtgagctg

SEQ ID NO: 3684 - DNA, 51 bp, Artificial Sequence
  Synthetic polynucleotide
caactcctatgtggctggccagtacratgatgcagcctcctaccagcgcct

SEQ ID NO: 3685 - DNA, 51 bp, Artificial Sequence
  Synthetic polynucleotide
gctccgggctcccagcagaggctggraccgcatcatcgtggagaagccctt

SEQ ID NO: 3686 - DNA, 51 bp, Artificial Sequence
  Synthetic polynucleotide
acagccactccactgtggcggagggrcaggacaggccactacctatgcaac

SEQ ID NO: 3687 - DNA, 51 bp, Artificial Sequence
  Synthetic polynucleotide
cagcctggctgcaacagcgtttgctrtgaccaattcttccccatctcccat

SEQ ID NO: 3688 - DNA, 51 bp, Artificial Sequence
  Synthetic polynucleotide
gcctctggcatctgcatcatcctcartgtggccgaggtggtgtacctcatc

SEQ ID NO: 3689 - DNA, 51 bp, Artificial Sequence
  Synthetic polynucleotide
ccgtcctgtacactttgagctcatgrgtgagtgggaacgttcctacttcgg

SEQ ID NO: 3690 - DNA, 51 bp, Artificial Sequence
  Synthetic polynucleotide
ggctatgtgaccatgtcggtgggaaragtctttcaccctggtactgctcca

SEQ ID NO: 3691 - DNA, 51 bp, Artificial Sequence
  Synthetic polynucleotide
tatggatgctgtcgcttccttcgagrtggttataaaactccaagagaggtt

SEQ ID NO: 3692 - DNA, 51 bp, Artificial Sequence
  Synthetic polynucleotide
ttatggaatgtgggagcgtggagatragactaatcagggcatcccggaatt

SEQ ID NO: 3693 - DNA, 51 bp, Artificial Sequence
  Synthetic polynucleotide
cgctccgatcatgagtttctcttccrttactgcaacgcctacttaaatgct

SEQ ID NO: 3694 - DNA, 51 bp, Artificial Sequence
  Synthetic polynucleotide
ttcaatttcttaacctatctcaaagrtggagatcagtgtgagtccaatcca

SEQ ID NO: 3695 - DNA, 51 bp, Artificial Sequence
  Synthetic polynucleotide
tgtttaaatggcggcagttgcaaggrtgacattaattcctatgaatgttgg

SEQ ID NO: 3696 - DNA, 51 bp, Artificial Sequence
  Synthetic polynucleotide
cgaattattcctcaccacaactacartgcagctattaataagtacaaccat

SEQ ID NO: 3697 - DNA, 51 bp, Artificial Sequence
  Synthetic polynucleotide
tacaaagttcaccatctataacaacrtgttctgtgctggcttccatgaagg

SEQ ID NO: 3698 - DNA, 51 bp, Artificial Sequence
  Synthetic polynucleotide
aggtagagattcatgtcaaggagatrgtgggggaccccatgttactgaagt

SEQ ID NO: 3699 - DNA, 51 bp, Artificial Sequence
  Synthetic polynucleotide
cctcgacgctgcatgaggcaccactrtgtggattctatcagtcacccattg

SEQ ID NO: 3700 - DNA, 51 bp, Artificial Sequence
  Synthetic polynucleotide
tctagagaagtttttccttacaacartgagaaaacatgtactagctgcatc

SEQ ID NO: 3701 - DNA, 51 bp, Artificial Sequence
  Synthetic polynucleotide
tcggaccctcgacgctgcatgaggcrccactatgtggattctatcagtcac

SEQ ID NO: 3702 - DNA, 51 bp, Artificial Sequence
  Synthetic polynucleotide
ggctatcatggctgctcctttattcrtgtctaatgacctccgacacatcag

SEQ ID NO: 3703 - DNA, 51 bp, Artificial Sequence
  Synthetic polynucleotide
atccctggggctagagcactggacartggattggcaaggacgcctaccatg

SEQ ID NO: 3704 - DNA, 51 bp, Artificial Sequence
  Synthetic polynucleotide
gagtcatatctgttttcacagcccarttatacagaaatccgacagtactgc

SEQ ID NO: 3705 - DNA, 51 bp, Artificial Sequence
  Synthetic polynucleotide
aaggttaagaagtcacataaatcccrcaggcactgttttgcttcagctaga

SEQ ID NO: 3706 - DNA, 51 bp, Artificial Sequence
  Synthetic polynucleotide
tctttttctcagttagtgattggcarctttggcctcagctggaatcagcaa

SEQ ID NO: 3707 - DNA, 51 bp, Artificial Sequence
  Synthetic polynucleotide
agaagataaagagaaaaaagaaacaraagagaaatctcatttatccacctc

SEQ ID NO: 3708 - DNA, 51 bp, Artificial Sequence
  Synthetic polynucleotide
gcagaaactggcccccttcctcaagrtgtatggtgagtatgtgaagaactt

SEQ ID NO: 3709 - DNA, 51 bp, Artificial Sequence
  Synthetic polynucleotide
gcggagccctggggccgtcgcacctrtgtcacctggattgccctgatggtg

SEQ ID NO: 3710 - DNA, 51 bp, Artificial Sequence
  Synthetic polynucleotide
atgacgctagtgattgtggtcgtctrtgtgctgtgctgggcacccttcttc

SEQ ID NO: 3711 - DNA, 51 bp, Artificial Sequence
  Synthetic polynucleotide
atcaagttcatccccacttataagtrtgactctaaaacagaccggtgggat

SEQ ID NO: 3712 - DNA, 51 bp, Artificial Sequence
  Synthetic polynucleotide
caactggacaggaatctcacctttcrtaaaatggtggcatggatgattgca

SEQ ID NO: 3713 - DNA, 51 bp, Artificial Sequence
  Synthetic polynucleotide
gctgtgcaccatgatgaggagaaagrtgtgatcacaggcctgaaacaaaag

SEQ ID NO: 3714 - DNA, 51 bp, Artificial Sequence
  Synthetic polynucleotide
tggaacaggatgtttcttactatgtratacaggccataaggttggtttttt

SEQ ID NO: 3715 - DNA, 51 bp, Artificial Sequence
  Synthetic polynucleotide
cggccccacagcgggctcccttactrctggaatgcagacacagaccttgta

SEQ ID NO: 3716 - DNA, 51 bp, Artificial Sequence
  Synthetic polynucleotide
ctgaacctgattgtactttgtttgcrgtcccatcccccagaggatgaagat

SEQ ID NO: 3717 - DNA, 51 bp, Artificial Sequence
  Synthetic polynucleotide
caccattggagaataacttttattartaagtgctatgagctctgtgacact

SEQ ID NO: 3718 - DNA, 51 bp, Artificial Sequence
  Synthetic polynucleotide
gccatgctgatgttggatagcttctrtaggagcattgaagggttcgaaata

SEQ ID NO: 3719 - DNA, 51 bp, Artificial Sequence
  Synthetic polynucleotide
taattaaaacaaattatcttcatcartttattcagcgaataggtcatggtg

SEQ ID NO: 3720 - DNA, 51 bp, Artificial Sequence
  Synthetic polynucleotide
aggaaaactgcatatatttaatgccragaaggcagctgcccattataagtg

SEQ ID NO: 3721 - DNA, 51 bp, Artificial Sequence
  Synthetic polynucleotide
gaaaatgaagcacgaggaaaactgcrtatatttaatgccaagaaggcagct

SEQ ID NO: 3722 - DNA, 51 bp, Artificial Sequence
  Synthetic polynucleotide
cacagtccagctcacaacaacatcargagcagaatttggagactttgatat

SEQ ID NO: 3723 - DNA, 51 bp, Artificial Sequence
  Synthetic polynucleotide
gcctccgcctgagcccgcacccgccrtggacaactacgcagatctttcgga

SEQ ID NO: 3724 - DNA, 51 bp, Artificial Sequence
  Synthetic polynucleotide
ggccatagagcgagaaaaagctgagragttcagaaaactgcaagatgccag

SEQ ID NO: 3725 - DNA, 51 bp, Artificial Sequence
  Synthetic polynucleotide
tctacgaaagcaggctgaggaggtcratactgagtgggaaaaattgaacct

SEQ ID NO: 3726 - DNA, 51 bp, Artificial Sequence
  Synthetic polynucleotide
actgagtgggaaaaattgaacctgcrctccgctgactggcagagaaaaata

SEQ ID NO: 3727 - DNA, 51 bp, Artificial Sequence
  Synthetic polynucleotide
tcccccaaacccttctctgcagatcrcggtcagtctagcacagggatatga

SEQ ID NO: 3728 - DNA, 51 bp, Artificial Sequence
  Synthetic polynucleotide
tcgatcgcacttcagttatgataaaytgaccttgttatgtgatcaataatc

SEQ ID NO: 3729 - DNA, 51 bp, Artificial Sequence
  Synthetic polynucleotide
atcgccctccctgctaccttcgtcarcagtgccatccgttacctggagggc

SEQ ID NO: 3730 - DNA, 51 bp, Artificial Sequence
  Synthetic polynucleotide
tttgatttctttttttttcattggcrgatcatgatcaggagcatttttttg

SEQ ID NO: 3731 - DNA, 51 bp, Artificial Sequence
  Synthetic polynucleotide
gagaggccagtacgacgtggccatcragatgatcaaagaaggctccatgtc

SEQ ID NO: 3732 - DNA, 51 bp, Artificial Sequence
  Synthetic polynucleotide
agcaccatccctgagctcattaactrccatcagcacaactctgcaggtgag

SEQ ID NO: 3733 - DNA, 51 bp, Artificial Sequence
  Synthetic polynucleotide
ggggaaagaaggaggtttcattgtcrgagactccagcaaagctggcaaata

SEQ ID NO: 3734 - DNA, 51 bp, Artificial Sequence
  Synthetic polynucleotide
caccttctaggggttttgatgtgggraatttactccctggggaagatgcca

SEQ ID NO: 3735 - DNA, 51 bp, Artificial Sequence
  Synthetic polynucleotide
ctacacgcacccgagctccctgcgcraacacatgaaggtaattacctcttt

SEQ ID NO: 3736 - DNA, 51 bp, Artificial Sequence
  Synthetic polynucleotide
gccatcatcgagaacccattcctcartggagaggtcatccggctggatggg

SEQ ID NO: 3737 - DNA, 51 bp, Artificial Sequence
  Synthetic polynucleotide
caagtgccagtatcaggcccctgatrtggacaccctgcagatacatgtcat

SEQ ID NO: 3738 - DNA, 51 bp, Artificial Sequence
  Synthetic polynucleotide
atacatgtcatggagtgcattgagtrgggccggccagtgcaaggccactgc

SEQ ID NO: 3739 - DNA, 51 bp, Artificial Sequence
  Synthetic polynucleotide
ttggacattgccttcttgttactctrtttcaatgatactcataaaagcatt

SEQ ID NO: 3740 - DNA, 51 bp, Artificial Sequence
  Synthetic polynucleotide
aaggtgaagaacaccatctactgcarcgtggagccatcggaatcaaatatg

SEQ ID NO: 3741 - DNA, 51 bp, Artificial Sequence
  Synthetic polynucleotide
ggcaagaaaaagaagcagtacaaagrtaaatatttggcaaagcacaatgca

SEQ ID NO: 3742 - DNA, 51 bp, Artificial Sequence
  Synthetic polynucleotide
acttcgggtggagaagacagggcacrgtggtactctggatcccaaggtgac

SEQ ID NO: 3743 - DNA, 51 bp, Artificial Sequence
  Synthetic polynucleotide
attaatgaccacagcggtcatctctrcctgcgaccatggtatagtagccaa

SEQ ID NO: 3744 - DNA, 51 bp, Artificial Sequence
  Synthetic polynucleotide
gttctgtaatcgaagacaaaaagagraaagaatgactccgccaggggatca

SEQ ID NO: 3745 - DNA, 51 bp, Artificial Sequence
  Synthetic polynucleotide
gggcggtgtgtgccgcacacgcaccrtgaagatcatcatgaaggttgggca

SEQ ID NO: 3746 - DNA, 51 bp, Artificial Sequence
  Synthetic polynucleotide
ttcttataggtggtaagttttcttcrtacagttcttttgtgtgacaaactg

SEQ ID NO: 3747 - DNA, 51 bp, Artificial Sequence
  Synthetic polynucleotide
ttcttttgatcaggtgtgggcaatavtagtgaaggtggaagaggaaaggca

SEQ ID NO: 3748 - DNA, 51 bp, Artificial Sequence
  Synthetic polynucleotide
ggacaaactaagcctgtttatgtatrtaggttcttagctcaggtaggttta

SEQ ID NO: 3749 - DNA, 51 bp, Artificial Sequence
  Synthetic polynucleotide
agaagaagagttgactgaagaagaargaaaagcagcttgggctgagtatga

SEQ ID NO: 3750 - DNA, 51 bp, Artificial Sequence
  Synthetic polynucleotide
gtagcaatggtgggagatggaatcartgactccccagctctggcaatggct

SEQ ID NO: 3751 - DNA, 51 bp, Artificial Sequence
  Synthetic polynucleotide
ggaaaagcctttcgctctaaagtggrgttgattgcgtacttcgaaaaggta

SEQ ID NO: 3752 - DNA, 51 bp, Artificial Sequence
  Synthetic polynucleotide
catagacctggggaatggtcagaccrggaagtttctgctggacggggatga

SEQ ID NO: 3753 - DNA, 51 bp, Artificial Sequence
  Synthetic polynucleotide
ccctttgctgtgcccaacccgaagcrggtaagcacattctctgcaggaagc

SEQ ID NO: 3754 - DNA, 51 bp, Artificial Sequence
  Synthetic polynucleotide
gctgccccctttgatgatgatgacargatcgttgggggctacaactgtgag

SEQ ID NO: 3755 - DNA, 51 bp, Artificial Sequence
  Synthetic polynucleotide
cacttctgtggtggctccctcatcarcgaacagtgggtggtatcagcaggc

SEQ ID NO: 3756 - DNA, 51 bp, Artificial Sequence
  Synthetic polynucleotide
aaccaatcaaattccaatgcttattrgaaggaaagaaacaaaggattatgg

SEQ ID NO: 3757 - DNA, 51 bp, Artificial Sequence
  Synthetic polynucleotide
atgaatgtgagctggtcagctgatcrcagagttattgatggtgctacaatg

SEQ ID NO: 3758 - DNA, 51 bp, Artificial Sequence
  Synthetic polynucleotide
ttggttgtagacagtctgcattgagraaaatgaaacacttggtggaacatg

SEQ ID NO: 3759 - DNA, 51 bp, Artificial Sequence
  Synthetic polynucleotide
cttgcagaccttatcagaagcttttrgagaagcaaatcttgctgcgtcatt

SEQ ID NO: 3760 - DNA, 51 bp, Artificial Sequence
  Synthetic polynucleotide
cattggtgatgtagttgctggtccartgctggctcacaaagcagaggatga

SEQ ID NO: 3761 - DNA, 51 bp, Artificial Sequence
  Synthetic polynucleotide
cgcaggacaccgctctatgacttccrcctggcccacggcgggaaaatggtg

SEQ ID NO: 3762 - DNA, 51 bp, Artificial Sequence
  Synthetic polynucleotide
ggctcaacctcgtctttaagtggtargaaccatatagagaggagatcagca

SEQ ID NO: 3763 - DNA, 51 bp, Artificial Sequence
  Synthetic polynucleotide
cagcatttggatctgttttaggcctrtggaggtgcctatgatgtcatgagc

SEQ ID NO: 3764 - DNA, 51 bp, Artificial Sequence
  Synthetic polynucleotide
ccagatgtgctcaagtctcgattccrgactggtgagtggaaggtagtgggg

SEQ ID NO: 3765 - DNA, 51 bp, Artificial Sequence
  Synthetic polynucleotide
tctgctcgtgtttgactatgaaggargcggttccgaagctgctagtctgag

SEQ ID NO: 3766 - DNA, 51 bp, Artificial Sequence
  Synthetic polynucleotide
gtcgatctctctgcagagtttccctdcgtataccctggtggttcaagctgc

SEQ ID NO: 3767 - DNA, 51 bp, Artificial Sequence
  Synthetic polynucleotide
tgccacgccctggccacatgtgtcartgtggtgggcagctacttgtgcgta

SEQ ID NO: 3768 - DNA, 51 bp, Artificial Sequence
  Synthetic polynucleotide
gctgatgctttgggcaaaatccctcrgacagtaagaagattctataccatg

SEQ ID NO: 3769 - DNA, 51 bp, Artificial Sequence
  Synthetic polynucleotide
tgacatcctccctattttgcatctcrggtcacccgatgacccgtgccttta

SEQ ID NO: 3770 - DNA, 51 bp, Artificial Sequence
  Synthetic polynucleotide
acgatacttgttaagtggctaccccraaacgatctgcttggtatgttgggc

SEQ ID NO: 3771 - DNA, 51 bp, Artificial Sequence
  Synthetic polynucleotide
gcccttgtttggtgatcagatggacvatgcaaagcgcatggagactaaggg

SEQ ID NO: 3772 - DNA, 51 bp, Artificial Sequence
  Synthetic polynucleotide
tctctccccgcaggaatcctgtactrtgtctacatggggctgctggcagtg

SEQ ID NO: 3773 - DNA, 51 bp, Artificial Sequence
  Synthetic polynucleotide
cccacccacgtcaacaacggcaactrcacgctgctggctgccaaccccttc

SEQ ID NO: 3774 - DNA, 51 bp, Artificial Sequence
  Synthetic polynucleotide
ctgcaccgagggccgccccctgctcrtggtctttgagtatatgcggcacgg

SEQ ID NO: 3775 - DNA, 51 bp, Artificial Sequence
  Synthetic polynucleotide
ctccaggaaaaccgggaggtgggagrctggcgcaagaacatcgatgcactg

SEQ ID NO: 3776 - DNA, 51 bp, Artificial Sequence
  Synthetic polynucleotide
gcgggcccacctcaagcaggtgaagraggaggacaccgagaaggtgagtgt

SEQ ID NO: 3777 - DNA, 51 bp, Artificial Sequence
  Synthetic polynucleotide
attgagagcgacctggaacgtgcagdggagcgggctgagctctcagaaggg

SEQ ID NO: 3778 - DNA, 51 bp, Artificial Sequence
  Synthetic polynucleotide
cctggcctatgagcctgtgtgggccrttggtactggcaagactgcaacacc

SEQ ID NO: 3779 - DNA, 51 bp, Artificial Sequence
  Synthetic polynucleotide
aatggcctggtctacatgaagtacgrcacgcctttcatttttgctgaggtg

SEQ ID NO: 3780 - DNA, 51 bp, Artificial Sequence
  Synthetic polynucleotide
ccctgtgtttgctggctttcttcacrgaagtaaaagattatgagcctccat

SEQ ID NO: 3781 - DNA, 51 bp, Artificial Sequence
  Synthetic polynucleotide
gctataggtgggaactgcaagatacrtggctccagaagtcctagaatccag

SEQ ID NO: 3782 - DNA, 51 bp, Artificial Sequence
  Synthetic polynucleotide
cattttgaatccttcaaacgtgctgrcatctatgcaatgggcttagtattc

SEQ ID NO: 3783 - DNA, 51 bp, Artificial Sequence
  Synthetic polynucleotide
ctgccatgccagccgcttcctgcacrtgaaggtggaatgccccacagaact

SEQ ID NO: 3784 - DNA, 51 bp, Artificial Sequence
  Synthetic polynucleotide
ccatgccagccgcttcctgcacatgraggtggaatgccccacagaactctt

SEQ ID NO: 3785 - DNA, 51 bp, Artificial Sequence
  Synthetic polynucleotide
aaccttgaatggggaaatggcagtgrcacggggccagctgaaaaatggggg

SEQ ID NO: 3786 - DNA, 51 bp, Artificial Sequence
  Synthetic polynucleotide
aggcctgctgaaaatgactgaatatraacttgtggtagttggagctggtgg

SEQ ID NO: 3787 - DNA, 51 bp, Artificial Sequence
  Synthetic polynucleotide
gtgcccatggtgctggtggggaacargtgtgacctggctgcacgcactgtg

SEQ ID NO: 3788 - DNA, 51 bp, Artificial Sequence
  Synthetic polynucleotide
gacctgctgtttaaggactctgcccrcgggtttttaaaagtcccccccagg

SEQ ID NO: 3789 - DNA, 51 bp, Artificial Sequence
  Synthetic polynucleotide
cttttgtttgttccggtcggaaaccraggaccttctgttcagagatgacac

SEQ ID NO: 3790 - DNA, 51 bp, Artificial Sequence
  Synthetic polynucleotide
atgagttcttcattattttagaggtraagaactcagaatttaatacttgaa

SEQ ID NO: 3791 - DNA, 51 bp, Artificial Sequence
  Synthetic polynucleotide
gtgtgtttttttctcgcagagaaccrtggagtctggcagtaccgccgccag

SEQ ID NO: 3792 - DNA, 51 bp, Artificial Sequence
  Synthetic polynucleotide
gcctgcatccggcagaagggcggctrctgcagctggtaccgaggatgggcc

SEQ ID NO: 3793 - DNA, 51 bp, Artificial Sequence
  Synthetic polynucleotide
  misc_feature (26)..(26): n is a, c, g, t or u
gattacaggtgtgagccaccgcaccnagccaattttgagtatttttaaaag

SEQ ID NO: 3794 - DNA, 51 bp, Artificial Sequence
  Synthetic polynucleotide
taacatgttactctttcttgtttcargtaaaatatgcaatatacrtygtct

SEQ ID NO: 3795 - DNA, 51 bp, Artificial Sequence
  Synthetic polynucleotide
aggttgatgcttttgaagaacgacakaaaagttggggaattgactgtcttt

SEQ ID NO: 3796 - DNA, 51 bp, Artificial Sequence
  Synthetic polynucleotide
tctaccttgacagacctccagccgtrcatgcgacagttcgtggctcacctg

SEQ ID NO: 3797 - DNA, 51 bp, Artificial Sequence
  Synthetic polynucleotide
cttttgccggaggacagagactgacrtggaacaggggaagggcctggctgt

SEQ ID NO: 3798 - DNA, 51 bp, Artificial Sequence
  Synthetic polynucleotide
atctgcaggaatcgtgtgactaatartgtaaaagacgtcactaaattggta

SEQ ID NO: 3799 - DNA, 51 bp, Artificial Sequence
  Synthetic polynucleotide
gcggagctgctaagagcctgctgacrtgacatcggccacagagtttgaaaa

SEQ ID NO: 3800 - DNA, 51 bp, Artificial Sequence
  Synthetic polynucleotide
gagcgggtcgctgagaggggtcagargcttgaggattcctatcacttacaa

SEQ ID NO: 3801 - DNA, 51 bp, Artificial Sequence
  Synthetic polynucleotide
tttacagtaccggagtacactggaarggatgcttgatgtaacaatgctaca

SEQ ID NO: 3802 - DNA, 51 bp, Artificial Sequence
  Synthetic polynucleotide
gacccgagctgggcccgtgtggtcarcctcaatgccctgctcatgatggca

SEQ ID NO: 3803 - DNA, 51 bp, Artificial Sequence
  Synthetic polynucleotide
cacgagctcattcgcaatgcagccgrtatctccatcatcgttatctacttc

SEQ ID NO: 3804 - DNA, 51 bp, Artificial Sequence
  Synthetic polynucleotide
tctctaccaggtgtgcctgaccctgrcagccaagcgcatggcacggaagaa

SEQ ID NO: 3805 - DNA, 51 bp, Artificial Sequence
  Synthetic polynucleotide
cttcccggacagtcctggcctcaacrgaaccgtggttaacatctcgtccct

SEQ ID NO: 3806 - DNA, 51 bp, Artificial Sequence
  Synthetic polynucleotide
ctcaccaacctcatccacaccaagtrcccgcagcttctgccaggtgagcag

SEQ ID NO: 3807 - DNA, 51 bp, Artificial Sequence
  Synthetic polynucleotide
tgcgaggacaccatctttgaaatgcrgctggcggctcagatctcggagtcg

SEQ ID NO: 3808 - DNA, 51 bp, Artificial Sequence
  Synthetic polynucleotide
cagtccttcctgtacctgggctggtrtatggtgatgtccctcttgggacac

SEQ ID NO: 3809 - DNA, 51 bp, Artificial Sequence
  Synthetic polynucleotide
ctctgtctcaaaaaaaaaaaaaaacrtatgtaaagttgttcccaaatgcca

SEQ ID NO: 3810 - DNA, 51 bp, Artificial Sequence
  Synthetic polynucleotide
ggtgtactacttcctggaggaaagcrcaggctacatggaacccgccctgcg

SEQ ID NO: 3811 - DNA, 51 bp, Artificial Sequence
  Synthetic polynucleotide
tctccctacctgcctgtcctcaggtrcatccccgagggcctgcagtgctcg

SEQ ID NO: 3812 - DNA, 51 bp, Artificial Sequence
  Synthetic polynucleotide
ggcctgcagtgctcgtgtggaatcgrctactacacgctcaagccggaggtc

SEQ ID NO: 3813 - DNA, 51 bp, Artificial Sequence
  Synthetic polynucleotide
catgaccatcccagcgttctttgccragagcgccgccatctacaaccctgt

SEQ ID NO: 3814 - DNA, 51 bp, Artificial Sequence
  Synthetic polynucleotide
cctaacttctacgtgcccttctccartgcgacgggtgtggtacgcagcccc

SEQ ID NO: 3815 - DNA, 51 bp, Artificial Sequence
  Synthetic polynucleotide
aagggtgctgtggatcagggaaatgrtgagtatgaagctgttttaaattct

SEQ ID NO: 3816 - DNA, 51 bp, Artificial Sequence
  Synthetic polynucleotide
ctttggacaaaaaggctggcccaaargatcctgccccactggagttttcca

SEQ ID NO: 3817 - DNA, 51 bp, Artificial Sequence
  Synthetic polynucleotide
gagtgcccagaatccctctgccagtrcagtttcaattcacagcgttttgct

SEQ ID NO: 3818 - DNA, 51 bp, Artificial Sequence
  Synthetic polynucleotide
tttgctgacaaagaagaaggtggagrtgtgaagtccgtgtgcatgaccttg

SEQ ID NO: 3819 - DNA, 51 bp, Artificial Sequence
  Synthetic polynucleotide
ataaactcagctgccaagacctactrcatgtctggtggccttcagcctgtg

SEQ ID NO: 3820 - DNA, 51 bp, Artificial Sequence
  Synthetic polynucleotide
gcaaattcttgctgtcagaacatagrtcaaagttttccaggcttccatgga

SEQ ID NO: 3821 - DNA, 51 bp, Artificial Sequence
  Synthetic polynucleotide
actggaacatcatctttacatgtttdtgatggcaagtttctggctcgggtt

SEQ ID NO: 3822 - DNA, 51 bp, Artificial Sequence
  Synthetic polynucleotide
ctgaagcagaagaggcggaccctgaraaaccgcggctatgcccagtcctgc

SEQ ID NO: 3823 - DNA, 51 bp, Artificial Sequence
  Synthetic polynucleotide
tccctcctctacgggcttgtgcaccrgggcatgaaatgctcctgtgagtga

SEQ ID NO: 3824 - DNA, 51 bp, Artificial Sequence
  Synthetic polynucleotide
cttcctcatggttctaggaaaaggcrgttttgggaaggttggattcctggg

SEQ ID NO: 3825 - DNA, 51 bp, Artificial Sequence
  Synthetic polynucleotide
acggacaaagagattgaggttctctrtattcggaatgtaacttttgaggac

SEQ ID NO: 3826 - DNA, 51 bp, Artificial Sequence
  Synthetic polynucleotide
aaggagattacagcttccccagactrcctggagatagccatttactgcata

SEQ ID NO: 3827 - DNA, 51 bp, Artificial Sequence
  Synthetic polynucleotide
tgcccagccccacatccagtggatcragcacgtggaaaagaacggcagtaa

SEQ ID NO: 3828 - DNA, 51 bp, Artificial Sequence
  Synthetic polynucleotide
actgttcatagatgatgccacagagraagacctttctgatctggtgtcaga

SEQ ID NO: 3829 - DNA, 51 bp, Artificial Sequence
  Synthetic polynucleotide
aacatgtgtgctcagctttgtgtcarttaccctggaggttacacttgctat

SEQ ID NO: 3830 - DNA, 51 bp, Artificial Sequence
  Synthetic polynucleotide
aaatggttttgttatgctttcaaatragaaagattgtaaaggtaagagcag

SEQ ID NO: 3831 - DNA, 51 bp, Artificial Sequence
  Synthetic polynucleotide
gcctgtttcagattacatcaatgcaratatcatcatggtaagctttgcttt

SEQ ID NO: 3832 - DNA, 51 bp, Artificial Sequence
  Synthetic polynucleotide
cctgtttcagattacatcaatgcaavtatcatcatggtaagctttgctttt

SEQ ID NO: 3833 - DNA, 51 bp, Artificial Sequence
  Synthetic polynucleotide
caagaaaacaaaaacaaaaatagatvtaaaaacatcctgccctgtaagtat

SEQ ID NO: 3834 - DNA, 51 bp, Artificial Sequence
  Synthetic polynucleotide
  misc_feature (26)..(26): n is a, c, g, t or u
cacatcaagattcagaacactggtgnttactatgacctgtatggaggggag

SEQ ID NO: 3835 - DNA, 51 bp, Artificial Sequence
  Synthetic polynucleotide
aagattcagaacactggtgattactrtgacctgtatggaggggagaaattt

SEQ ID NO: 3836 - DNA, 51 bp, Artificial Sequence
  Synthetic polynucleotide
  misc_feature (26)..(26): n is a, c, g, t or u
ggggagaaatttgccactttggctgngttggtccagtattacatggaacat

SEQ ID NO: 3837 - DNA, 51 bp, Artificial Sequence
  Synthetic polynucleotide
tttgccactttggctgagttggtccrgtattacatggaacatcacgggcaa

SEQ ID NO: 3838 - DNA, 51 bp, Artificial Sequence
  Synthetic polynucleotide
tcagggatggtccagacagaagcacvgtaccgatttatctatatggcggtc

SEQ ID NO: 3839 - DNA, 51 bp, Artificial Sequence
  Synthetic polynucleotide
aactctccgtacatcgtgggcttctrtggtgcgttctacagcgatggcgag

SEQ ID NO: 3840 - DNA, 51 bp, Artificial Sequence
  Synthetic polynucleotide
ccagcgctcccgggactactcggccrtgatcaagcacctgagaacgcacaa

SEQ ID NO: 3841 - DNA, 51 bp, Artificial Sequence
  Synthetic polynucleotide
agtggtggggggccttggcggctacrtgctgggaagtgccatgagcaggcc

SEQ ID NO: 3842 - DNA, 51 bp, Artificial Sequence
  Synthetic polynucleotide
gtggttgagcagatgtgtatcacccrgtacgagagggaatctcaggcctat

SEQ ID NO: 3843 - DNA, 51 bp, Artificial Sequence
  Synthetic polynucleotide
ctttgtgcacgactgcgtcaatatcrcaatcaagcagcacacggtcaccac

SEQ ID NO: 3844 - DNA, 51 bp, Artificial Sequence
  Synthetic polynucleotide
tgcgtcaatatcacaatcaagcagcrcacggtcaccacaaccaccaagggg

SEQ ID NO: 3845 - DNA, 51 bp, Artificial Sequence
  Synthetic polynucleotide
accattgccgccctgctgagcccctrctcctattccaccacggctgtcgtc

SEQ ID NO: 3846 - DNA, 51 bp, Artificial Sequence
  Synthetic polynucleotide
gtctggagagctgcatgggctcacarctgaggaggaatttgtagaagggat

SEQ ID NO: 3847 - DNA, 51 bp, Artificial Sequence
  Synthetic polynucleotide
agaaaggctgctgatgacacctgggrgccatttgcctctgggtaagttgcc

SEQ ID NO: 3848 - DNA, 51 bp, Artificial Sequence
  Synthetic polynucleotide
ccagactttcacaccttataggaaarccagtgagtctggagagctgcatgg

SEQ ID NO: 3849 - DNA, 51 bp, Artificial Sequence
  Synthetic polynucleotide
cgactccggcccccgccgctacaccrttgccgccctgctgagcccctactc

SEQ ID NO: 3850 - DNA, 51 bp, Artificial Sequence
  Synthetic polynucleotide
tgtcctctgatggtcaaagttctagrtgctgtccgaggcagtcctgccatc

SEQ ID NO: 3851 - DNA, 51 bp, Artificial Sequence
  Synthetic polynucleotide
cacagaccccttcttcatcgtggaarcgctgtgtatcatctggttctcctt

SEQ ID NO: 3852 - DNA, 51 bp, Artificial Sequence
  Synthetic polynucleotide
gacggacttcttcaaaaacatcatgracttcatagacattgtggccatcat

SEQ ID NO: 3853 - DNA, 51 bp, Artificial Sequence
  Synthetic polynucleotide
aaaatcttcaactacggccgcatctrtggtgctgggcagccctttgctgag

SEQ ID NO: 3854 - DNA, 51 bp, Artificial Sequence
  Synthetic polynucleotide
gagcccacatggctcaccgccagcartgcccgggtatgtgacctctgtacc

SEQ ID NO: 3855 - DNA, 51 bp, Artificial Sequence
  Synthetic polynucleotide
acccgccaccttctgctggccaacarcagccttcagtccgtgcccccggga

SEQ ID NO: 3856 - DNA, 51 bp, Artificial Sequence
  Synthetic polynucleotide
ctggaaaccatggggctgtgggtggrctgcaggggccacggactcacggcc

SEQ ID NO: 3857 - DNA, 51 bp, Artificial Sequence
  Synthetic polynucleotide
cctggtcatttatagaaaccgaggtrtgaaattcgctggagggtcattgaa

SEQ ID NO: 3858 - DNA, 51 bp, Artificial Sequence
  Synthetic polynucleotide
gggggcttcactgttcagtgtcactragaagcagctgggagcaggaagtat

SEQ ID NO: 3859 - DNA, 51 bp, Artificial Sequence
  Synthetic polynucleotide
gtttcatgagttatctctctcacccrggcgaattgatgatgacaagggaag

SEQ ID NO: 3860 - DNA, 51 bp, Artificial Sequence
  Synthetic polynucleotide
acacacgccatgctgccctatgaccrgtacctgcaccgctttgctgcgtac

SEQ ID NO: 3861 - DNA, 51 bp, Artificial Sequence
  Synthetic polynucleotide
caaagccattggtgggatcattctgrcagccagtcacaacccagggggccc

SEQ ID NO: 3862 - DNA, 51 bp, Artificial Sequence
  Synthetic polynucleotide
ttcatgaaacaaatgaatgatgcacdtcatggtggctggacaacaaaaatg

SEQ ID NO: 3863 - DNA, 51 bp, Artificial Sequence
  Synthetic polynucleotide
cgagatcctctctctgaaatcactgvgcaggagaaagattttctatggagt

SEQ ID NO: 3864 - DNA, 51 bp, Artificial Sequence
  Synthetic polynucleotide
cccttcactgccatcctgtatggcartgggcctggctacaaggtggtgggc

SEQ ID NO: 3865 - DNA, 51 bp, Artificial Sequence
  Synthetic polynucleotide
agaaataaacaggtataagatgtgarttcagtcctcaaataaacctactat

SEQ ID NO: 3866 - DNA, 51 bp, Artificial Sequence
  Synthetic polynucleotide
ttctatatgaaagtgtgacattaacratgtacctactctgttagccgcgya

SEQ ID NO: 3867 - DNA, 51 bp, Artificial Sequence
  Synthetic polynucleotide
tttcctgtcgtagaatagcatgaaaraacttctgcctaattttcctgatct

SEQ ID NO: 3868 - DNA, 51 bp, Artificial Sequence
  Synthetic polynucleotide
ctggccctggaagggctcacggacarcgaggtggaggactgcctgactgtc

SEQ ID NO: 3869 - DNA, 51 bp, Artificial Sequence
  Synthetic polynucleotide
ttccttctttttgcaggaggcattgraattttcagcagagaccttccaagg

SEQ ID NO: 3870 - DNA, 51 bp, Artificial Sequence
  Synthetic polynucleotide
ctgcactgcacgcgcaactacatccrcatgcacctgttcctgtccttcatg

SEQ ID NO: 3871 - DNA, 51 bp, Artificial Sequence
  Synthetic polynucleotide
ttccatttttaggccaaatgttacartgaacttaatggatgcaccaagata

SEQ ID NO: 3872 - DNA, 51 bp, Artificial Sequence
  Synthetic polynucleotide
cgtggtgaaacacatccggacctacragcagagagaccccggcatcttcgc

SEQ ID NO: 3873 - DNA, 51 bp, Artificial Sequence
  Synthetic polynucleotide
cgacatctctcgccagctccgcgtcrgccatggctgcgtcagcaagatcct

SEQ ID NO: 3874 - DNA, 51 bp, Artificial Sequence
  Synthetic polynucleotide
gatgggctccacattccaactatgtraaatatgtgctgaaaatgataagga

SEQ ID NO: 3875 - DNA, 51 bp, Artificial Sequence
  Synthetic polynucleotide
ggtctagccagagacatcaagaatgrttctaattatgtggttaaaggaaac

SEQ ID NO: 3876 - DNA, 51 bp, Artificial Sequence
  Synthetic polynucleotide
gtgtattcacagagacttggcagccrgaaatatcctccttactcatggtcg

SEQ ID NO: 3877 - DNA, 51 bp, Artificial Sequence
  Synthetic polynucleotide
acgggaagccctcatgtctgaactcraagtcctgagttaccttggtaatca

SEQ ID NO: 3878 - DNA, 51 bp, Artificial Sequence
  Synthetic polynucleotide
cggaacgtgctggtcaagagtcccarccatgtcaaaattacagacttcggg

SEQ ID NO: 3879 - DNA, 51 bp, Artificial Sequence
  Synthetic polynucleotide
gattttggtcttgccagagacatgtrtgataaagaatactatagtgtacac

SEQ ID NO: 3880 - DNA, 51 bp, Artificial Sequence
  Synthetic polynucleotide
acagggcattttggttgtgtatatcvtgggactttgttggacaatgatggc

SEQ ID NO: 3881 - DNA, 51 bp, Artificial Sequence
  Synthetic polynucleotide
agtgtacacaacaaaacaggtgcaargctgccagtgaagtggatggctttg

SEQ ID NO: 3882 - DNA, 51 bp, Artificial Sequence
  Synthetic polynucleotide
  misc_feature (26)..(26): n is a, c, g, t or u
ttggacatactggatacagctggacnagaagagtacagtgccatgagagac

SEQ ID NO: 3883 - DNA, 51 bp, Artificial Sequence
  Synthetic polynucleotide
aggtgattttggtctagctacagtgvaatctcgatggagtgggtcccatca

SEQ ID NO: 3884 - DNA, 51 bp, Artificial Sequence
  Synthetic polynucleotide
gaagacctcacagtaaaaataggtgdttttggtctagctacagtgaaatct

SEQ ID NO: 3885 - DNA, 51 bp, Artificial Sequence
  Synthetic polynucleotide
gacttttgtcgaaagctgcttttccrgggtttccgctgtcaaacatgtggt

SEQ ID NO: 3886 - DNA, 51 bp, Artificial Sequence
  Synthetic polynucleotide
tacacctcagcagttacaagccttcraaaatgaagtaggagtactcaggtg

SEQ ID NO: 3887 - DNA, 51 bp, Artificial Sequence
  Synthetic polynucleotide
  misc_feature (26)..(26): n is a, c, g, t or u
cagcagttacaagccttcaaaaatgnagtaggagtactcaggtgagcttgt

SEQ ID NO: 3888 - DNA, 51 bp, Artificial Sequence
  Synthetic polynucleotide
catccacagagacctcaagagtaatvgtatccttcctgaaatttgtctgcg

SEQ ID NO: 3889 - DNA, 51 bp, Artificial Sequence
  Synthetic polynucleotide
ctgaaccccaagtttgaggttggagrtatcatgctgatccgtgaccatatc

SEQ ID NO: 3890 - DNA, 51 bp, Artificial Sequence
  Synthetic polynucleotide
caacgtgagctacaggaaggcacctrtgtgatggtggcaggccccagcttt

SEQ ID NO: 3891 - DNA, 51 bp, Artificial Sequence
  Synthetic polynucleotide
cgacaaggagggcaatggcactgtcrtgggtgctgagcttcgccacgtgct

SEQ ID NO: 3892 - DNA, 51 bp, Artificial Sequence
  Synthetic polynucleotide
ctggggctgctggaggaaatgagggrcgagaggctgagccgcatcatcacg

SEQ ID NO: 3893 - DNA, 51 bp, Artificial Sequence
  Synthetic polynucleotide
ctggcagatgctgaggagcgctgtgrtcagctgatcaaaaacaagattcag

SEQ ID NO: 3894 - DNA, 51 bp, Artificial Sequence
  Synthetic polynucleotide
agacaacacttcattggtgttttggrcattgcaggctttgaaatctttgag

SEQ ID NO: 3895 - DNA, 51 bp, Artificial Sequence
  Synthetic polynucleotide
ctacattgacgaggtggggaccttcraagagcgcatccagtgggtagggga

SEQ ID NO: 3896 - DNA, 51 bp, Artificial Sequence
  Synthetic polynucleotide
tcccctcattcctcatagatcttccrctatgccaagggacaaccctacatt

SEQ ID NO: 3897 - DNA, 51 bp, Artificial Sequence
  Synthetic polynucleotide
gaaaagaaagtcttctggaaagtgayagctgtctgcctcccacttctgctc

SEQ ID NO: 3898 - DNA, 51 bp, Artificial Sequence
  Synthetic polynucleotide
tgttcctcccctttccgcctaggggraagtccccggacctcgggcagagag

SEQ ID NO: 3899 - DNA, 51 bp, Artificial Sequence
  Synthetic polynucleotide
tttctcagaaagacagaatccattgrtgtaatggatgcggttggaagtaat

SEQ ID NO: 3900 - DNA, 51 bp, Artificial Sequence
  Synthetic polynucleotide
gacagttaagcgggttgggatcatcrtaagttgtatctgggcagcttgcac

SEQ ID NO: 3901 - DNA, 51 bp, Artificial Sequence
  Synthetic polynucleotide
atattctacatctcttgtcctcagartccatattgtgtgtgcttcatgtct

SEQ ID NO: 3902 - DNA, 51 bp, Artificial Sequence
  Synthetic polynucleotide
ggctgatatgctggtgagcgtttcaratggatcagaaaccattgtcatcac

SEQ ID NO: 3903 - DNA, 51 bp, Artificial Sequence
  Synthetic polynucleotide
ctgggtgtcatcagcttgttggagartatcttagtgattgtggcaatagcc

SEQ ID NO: 3904 - DNA, 51 bp, Artificial Sequence
  Synthetic polynucleotide
aagattccatgctttcatgtgattchgaaattaaaaaaaaaagattcatta

SEQ ID NO: 3905 - DNA, 51 bp, Artificial Sequence
  Synthetic polynucleotide
agcgtgggccaggcaaccacagtggrgatcttcctgacgctccagttcgtg

SEQ ID NO: 3906 - DNA, 51 bp, Artificial Sequence
  Synthetic polynucleotide
aaaatggcaatcctcatcttcaccgrtttcacctgcatggcacctatctct

SEQ ID NO: 3907 - DNA, 51 bp, Artificial Sequence
  Synthetic polynucleotide
ccagaattaatggctaccaataaagrtacaaagattgctaagaaaatggca

SEQ ID NO: 3908 - DNA, 51 bp, Artificial Sequence
  Synthetic polynucleotide
caggcggtcctgccgcccctgcctcrggtggtgtgcacctaccgtgatgtg

SEQ ID NO: 3909 - DNA, 51 bp, Artificial Sequence
  Synthetic polynucleotide
catgttcattgtggacatcctcatcracttccgcaccacctacgtcaatgc

SEQ ID NO: 3910 - DNA, 51 bp, Artificial Sequence
  Synthetic polynucleotide
gctgcctacgcactggcgctgcaacragaccctgcccatcgctttcaaggt

SEQ ID NO: 3911 - DNA, 51 bp, Artificial Sequence
  Synthetic polynucleotide
aacaggctgcagaccatgaaggaggdactggacttccagaagaacatctac

SEQ ID NO: 3912 - DNA, 51 bp, Artificial Sequence
  Synthetic polynucleotide
tgaataccaacaactcctggatattdagatccgactggagaatgaaattca

SEQ ID NO: 3913 - DNA, 51 bp, Artificial Sequence
  Synthetic polynucleotide
ccgccgcgtccgccgcctccggaacyaaacggggtgaggtcacattcggtt

SEQ ID NO: 3914 - DNA, 51 bp, Artificial Sequence
  Synthetic polynucleotide
tgagaaggccaccatgcagaacctcvatgaccgcctggcctcctacctgga

SEQ ID NO: 3915 - DNA, 51 bp, Artificial Sequence
  Synthetic polynucleotide
gagaaggccaccatgcagaacctcartgaccgcctggcctcctacctggac

SEQ ID NO: 3916 - DNA, 51 bp, Artificial Sequence
  Synthetic polynucleotide
gagaaggtgaccatgcagaacctcartgaccgcctggcctcctacctggac

SEQ ID NO: 3917 - DNA, 51 bp, Artificial Sequence; identical to SEQ ID NO: 3916
  Synthetic polynucleotide

SEQ ID NO: 3918 - DNA, 51 bp, Artificial Sequence
  Synthetic polynucleotide
atcgccacttaccgcaagctgctggrgggcgaggaatgcaggtgagtagac

SEQ ID NO: 3919 - DNA, 51 bp, Artificial Sequence
  Synthetic polynucleotide
  misc_feature (26)..(26): n is a, c, g, t or u
ctgtgtctgcagagcccacacgtgtntccctgagaacaacggaggcgcggg

SEQ ID NO: 3920 - DNA, 51 bp, Artificial Sequence
  Synthetic polynucleotide
ccaggagagaaacgacattgccctgragaccaatggggaccaggcatcctg

SEQ ID NO: 3921 - DNA, 51 bp, Artificial Sequence
  Synthetic polynucleotide
tgcaccgccgaaggcctctgttgccrcagcgagtgcctgggcaactgttct

SEQ ID NO: 3922 - DNA, 51 bp, Artificial Sequence
  Synthetic polynucleotide
agaaacgacattgccctgaagaccartggggaccaggcatcctgtaagtca

SEQ ID NO: 3923 - DNA, 51 bp, Artificial Sequence
  Synthetic polynucleotide
cttctagctcagctgccagattgtcyaaggaaaggagagaatatccagtgg

SEQ ID NO: 3924 - DNA, 51 bp, Artificial Sequence
  Synthetic polynucleotide
tcaggggaaactcttcttccactatraccccaaactctgcttgtcagaaat

SEQ ID NO: 3925 - DNA, 51 bp, Artificial Sequence
  Synthetic polynucleotide
attaaaggactgactgaaggcctgcrtggattccatgttcatgagtttgga

SEQ ID NO: 3926 - DNA, 51 bp, Artificial Sequence
  Synthetic polynucleotide
gatggtgtggccgatgtgtctattgragattctgtgatctcactctcagga

SEQ ID NO: 3927 - DNA, 51 bp, Artificial Sequence
  Synthetic polynucleotide
ctgactgaaggcctgcatggattccrtgttcatgagtttggagataataca

SEQ ID NO: 3928 - DNA, 51 bp, Artificial Sequence
  Synthetic polynucleotide
atctgatgctttttcattattaggcrtgttggagacttgggcaatgtgact

SEQ ID NO: 3929 - DNA, 51 bp, Artificial Sequence
  Synthetic polynucleotide
gcacaggatgaaggactcctttctgrtgtggtacccttcaaagtaccaggt

SEQ ID NO: 3930 - DNA, 51 bp, Artificial Sequence
  Synthetic polynucleotide
gagagacaagtgaccatttggtttcrgaaccgaagagtgaaggacaagaaa

SEQ ID NO: 3931 - DNA, 51 bp, Artificial Sequence
  Synthetic polynucleotide
cgtgtggcgaagatggtcaagtcctrcctgcagcagcacaacatcccacag

SEQ ID NO: 3932 - DNA, 51 bp, Artificial Sequence
  Synthetic polynucleotide
ctggagcagggaggacaggaccagcrtaaaaggcagggcagagtcgactgt

SEQ ID NO: 3933 - DNA, 51 bp, Artificial Sequence
  Synthetic polynucleotide
ccctaaggtgaaggctcatggcaagraagtgctcggtgcctttagtgatgg

SEQ ID NO: 3934 - DNA, 51 bp, Artificial Sequence
  Synthetic polynucleotide
gttactgccctgtggggcaaggtgarcgtggatgaagttggtggtgaggcc

SEQ ID NO: 3935 - DNA, 51 bp, Artificial Sequence
  Synthetic polynucleotide
gggagggcaggagccagggctgggcvtaaaagtcagggcagagccatctat

SEQ ID NO: 3936 - DNA, 51 bp, Artificial Sequence
  Synthetic polynucleotide
gagggcaggagccagggctgggcatraaagtcagggcagagccatctattg

SEQ ID NO: 3937 - DNA, 51 bp, Artificial Sequence
  Synthetic polynucleotide
agggcaggagccagggctgggcatavaagtcagggcagagccatctattgc

SEQ ID NO: 3938 - DNA, 51 bp, Artificial Sequence
  Synthetic polynucleotide
tgagcatctggattctgcctaataaraaacatttattttcattgcaatgat

SEQ ID NO: 3939 - DNA, 51 bp, Artificial Sequence
  Synthetic polynucleotide
ttgagcatctggattctgcctaatadaaaacatttattttcattgcaatga

SEQ ID NO: 3940 - DNA, 51 bp, Artificial Sequence
  Synthetic polynucleotide
cttgagcatctggattctgcctaatraaaaacatttattttcattgcaatg

SEQ ID NO: 3941 - DNA, 51 bp, Artificial Sequence
  Synthetic polynucleotide
  misc_feature (26)..(26): n is a, c, g, t or u
gtgaacgtggatgaagttggtggtgnggccctgggcaggttggtatcaagg

SEQ ID NO: 3942 - DNA, 51 bp, Artificial Sequence
  Synthetic polynucleotide
tggcctggctcacctggacaacctcvagggcacctttgccacactgagtga

SEQ ID NO: 3943 - DNA, 51 bp, Artificial Sequence
  Synthetic polynucleotide
cccacagactcagagagaacccaccrtggtgctgtctcctgccgacaagac

SEQ ID NO: 3944 - DNA, 51 bp, Artificial Sequence
  Synthetic polynucleotide
caccggcccttcctggtctttgaatraagtctgagtgggcagcagcctgtg

SEQ ID NO: 3945 - DNA, 51 bp, Artificial Sequence
  Synthetic polynucleotide
cacccctcactctgcttctccccgcrggatgttcctgtccttccccaccac

SEQ ID NO: 3946 - DNA, 51 bp, Artificial Sequence
  Synthetic polynucleotide
gccctggatctggagattgccacctrcaggaccctcctggagggagaagaa

SEQ ID NO: 3947 - DNA, 51 bp, Artificial Sequence
  Synthetic polynucleotide
gcgccccgccgccgccgccgccgccrtgggctgcctcgggaacagtaagac

SEQ ID NO: 3948 - DNA, 51 bp, Artificial Sequence
  Synthetic polynucleotide
accagcatgtttgacgtgggtggccdgcgcgatgaacgccgcaagtggatc

SEQ ID NO: 3949 - DNA, 51 bp, Artificial Sequence
  Synthetic polynucleotide
ggcgcctctgacagcaacgtctatgrcctcctaaaggacctagaggaaggc

SEQ ID NO: 3950 - DNA, 51 bp, Artificial Sequence
  Synthetic polynucleotide
ttgtctttcctgcaggcgtctctccragtcgacacttttcctgatcccact

SEQ ID NO: 3951 - DNA, 51 bp, Artificial Sequence
  Synthetic polynucleotide
gaccaatgaaaatattcagcgatttraaatatgtccaacgccaaacaatca

SEQ ID NO: 3952 - DNA, 51 bp, Artificial Sequence
  Synthetic polynucleotide
caatgaaaatattcagcgatttaaartatgtccaacgccaaacaatcagtt

SEQ ID NO: 3953 - DNA, 51 bp, Artificial Sequence
  Synthetic polynucleotide
gatgggatgtggaacattacagtccratggtatgctggagagttactctgc

SEQ ID NO: 3954 - DNA, 51 bp, Artificial Sequence
  Synthetic polynucleotide
tttactgtctgctggactccctactrtgtcctaggaatttggtattggttt

SEQ ID NO: 3955 - DNA, 51 bp, Artificial Sequence
  Synthetic polynucleotide
gccggccgccccgagcgtgcgccctdccgcgacctgcgttgcgtggcgccc

SEQ ID NO: 3956 - DNA, 51 bp, Artificial Sequence
  Synthetic polynucleotide
tttgaagttgcttgggaagtgaccartaaaggtttgtactgctcctgaagg

SEQ ID NO: 3957 - DNA, 51 bp, Artificial Sequence
  Synthetic polynucleotide
cctccacccccactctaggtgtcctvtgtgaaagccattgacatttggatg

SEQ ID NO: 3958 - DNA, 51 bp, Artificial Sequence
  Synthetic polynucleotide
ctccggctctcgagcatctctgcccraggtaagtcccattgcccaagagca

SEQ ID NO: 3959 - DNA, 51 bp, Artificial Sequence
  Synthetic polynucleotide
ccccatggacttgaagaatttccccrtggatgtccagacatgtatcatgca

SEQ ID NO: 3960 - DNA, 51 bp, Artificial Sequence
  Synthetic polynucleotide
acggtggccacgatgatctcctgctrctacgaagaccatcagtgcgaggtc

SEQ ID NO: 3961 - DNA, 51 bp, Artificial Sequence
  Synthetic polynucleotide
aggctgtgatgctgctggctttttcrctgtctttgccagtgagctgtcagt

SEQ ID NO: 3962 - DNA, 51 bp, Artificial Sequence
  Synthetic polynucleotide
cgcctccccgcaccccagtgcatccrcagagacctggctgctcggaacatt

SEQ ID NO: 3963 - DNA, 51 bp, Artificial Sequence
  Synthetic polynucleotide
ccggcagtgatgacctcgcccctgtrcctggagatcatcatctattgcaca

SEQ ID NO: 3964 - DNA, 51 bp, Artificial Sequence
  Synthetic polynucleotide
agcatttacaaatcagtcttttccarctcttccaaagagatgatgtgtttc

SEQ ID NO: 3965 - DNA, 51 bp, Artificial Sequence
  Synthetic polynucleotide
aagcctaacgtgaaggaattcacagrgacctcggccatttttgaggatggg

SEQ ID NO: 3966 - DNA, 51 bp, Artificial Sequence
  Synthetic polynucleotide
accgggctgtcccctggggtcacctrttacttcaaagtctttgcagtgagc

SEQ ID NO: 3967 - DNA, 51 bp, Artificial Sequence
  Synthetic polynucleotide
cgtgcacaacctcgactactacaagvagacaaccaacgtgagcccggccct

SEQ ID NO: 3968 - DNA, 51 bp, Artificial Sequence
  Synthetic polynucleotide
gaggctgacgaggcgggcagtgtgtrtgcaggcatcctcagctacggggtg

SEQ ID NO: 3969 - DNA, 51 bp, Artificial Sequence
  Synthetic polynucleotide
gtgcaggcgcccagcaggttgatgaygtttttgtgtttcccgatcatcttc

SEQ ID NO: 3970 - DNA, 51 bp, Artificial Sequence
  Synthetic polynucleotide
gccctgcgtgcaggcgcccagcaggbtgatgatgtttttgtgtttcccgat

SEQ ID NO: 3971 - DNA, 51 bp, Artificial Sequence
  Synthetic polynucleotide
gacgtggagttccactgcaaggtgtrcagtgacgcacagccccacatccag

SEQ ID NO: 3972 - DNA, 51 bp, Artificial Sequence
  Synthetic polynucleotide
gtctgtaaacatggacagtgcatcartacagatggttcctatcgctgcgag

SEQ ID NO: 3973 - DNA, 51 bp, Artificial Sequence
  Synthetic polynucleotide
atacccagcctctgcacccacggcargtgcagaaacaccattggcagcttt

SEQ ID NO: 3974 - DNA, 51 bp, Artificial Sequence
  Synthetic polynucleotide
tataaatgtatatgcaattcaggatrtgaagtggattcaactgggaaaaac

SEQ ID NO: 3975 - DNA, 51 bp, Artificial Sequence
  Synthetic polynucleotide
ccgcgggtctgtctcttgcttcaacrgtgtttggacggaacagatccgggg

SEQ ID NO: 3976 - DNA, 51 bp, Artificial Sequence
  Synthetic polynucleotide
ttttcagatgttgacttgagtaaatrtatcaccactattgctggagtcatg

SEQ ID NO: 3977 - DNA, 51 bp, Artificial Sequence
  Synthetic polynucleotide
aggctttgttcgaaagaatggtgtcratgaagccaaaatagatgagatcaa

SEQ ID NO: 3978 - DNA, 51 bp, Artificial Sequence
  Synthetic polynucleotide
tttctaggcttagaagtggaaataarctgcacccggacccagaataccaag

SEQ ID NO: 3979 - DNA, 51 bp, Artificial Sequence
  Synthetic polynucleotide
ctcgttggatcctgggacaatatctrtgcctatggcgtccccccatcggcc

SEQ ID NO: 3980 - DNA, 51 bp, Artificial Sequence
  Synthetic polynucleotide
ggcttatccgatggcccctactccarcccttatgagaacagccttatccca

SEQ ID NO: 3981 - DNA, 51 bp, Artificial Sequence
  Synthetic polynucleotide
gacaaggagtgtgtctactattgccrcctggacatcatttggatcaacact

SEQ ID NO: 3982 - DNA, 51 bp, Artificial Sequence
  Synthetic polynucleotide
cagagcggacagcccctccacgagtytcttactgagaatggaggctttggg

SEQ ID NO: 3983 - DNA, 51 bp, Artificial Sequence
  Synthetic polynucleotide
gtagagtttgacttcctcgggaaggrctccatcagatactataacaaggtc

SEQ ID NO: 3984 - DNA, 51 bp, Artificial Sequence
  Synthetic polynucleotide
gttcagattcgtattttggatgtcartgacaatatacctgtagtagaaaat

SEQ ID NO: 3985 - DNA, 51 bp, Artificial Sequence
  Synthetic polynucleotide
tctgtgttcaattttgtgtctgtacrgtggtaccacttttactgctgatgt

SEQ ID NO: 3986 - DNA, 51 bp, Artificial Sequence
  Synthetic polynucleotide
tttctccttattttactctcttcacrgataattgcctttgcaacaactcca

SEQ ID NO: 3987 - DNA, 51 bp, Artificial Sequence
  Synthetic polynucleotide
ccaggatggtctcgatctcctgaccytatgatccgcccgccttggcctccc

SEQ ID NO: 3988 - DNA, 51 bp, Artificial Sequence
  Synthetic polynucleotide
gaggcctggcacgtcccccctcctcrctttcagagcgattaactagtcttg

SEQ ID NO: 3989 - DNA, 51 bp, Artificial Sequence
  Synthetic polynucleotide
cgccgctcggatgaggactacctgtrccgggaggagctggcgcagttccac

SEQ ID NO: 3990 - DNA, 51 bp, Artificial Sequence
  Synthetic polynucleotide
ctaacagtttcatgatcaacatgggrgactcccacgtggacaccagctcca

SEQ ID NO: 3991 - DNA, 51 bp, Artificial Sequence
  Synthetic polynucleotide
tggtttcatctccagggagttccacrggaaataccggatcccagctgatgt

SEQ ID NO: 3992 - DNA, 51 bp, Artificial Sequence
  Synthetic polynucleotide
aacacccagcagccgggctgcgagarcgtctgctacgacagggccttcccc

SEQ ID NO: 3993 - DNA, 51 bp, Artificial Sequence
  Synthetic polynucleotide
tacgatcactacttccccatctcccrcatccggctatgggccctgcagctg

SEQ ID NO: 3994 - DNA, 51 bp, Artificial Sequence
  Synthetic polynucleotide
cgtctaccccctcacccaatctaccytgatgggatatggaatcccaggctt

SEQ ID NO: 3995 - DNA, 51 bp, Artificial Sequence
  Synthetic polynucleotide
ctcaaaagcagcgtggacgcggtcargtactttgggaagggcacctacacc

SEQ ID NO: 3996 - DNA, 51 bp, Artificial Sequence
  Synthetic polynucleotide
ttttcatgagcgtctcttcttttccrgggtgacatccagcagctgctcttt

SEQ ID NO: 3997 - DNA, 51 bp, Artificial Sequence
  Synthetic polynucleotide
tataattttttttttttacttctctrgaactttgctgctcagtatgatgga

SEQ ID NO: 3998 - DNA, 51 bp, Artificial Sequence
  Synthetic polynucleotide
gagtgggtacattctgaaaagtaatrtaagtgtctcaattcactttctagt

SEQ ID NO: 3999 - DNA, 51 bp, Artificial Sequence
  Synthetic polynucleotide
acggaaggctcccagaacatcacctrccactgcaagaacagcattgcctat

SEQ ID NO: 4000 - DNA, 51 bp, Artificial Sequence
  Synthetic polynucleotide
cggtctgcctgggcaacgtggtgagrgaggattccctggcttgcctggccc

SEQ ID NO: 4001 - DNA, 51 bp, Artificial Sequence
  Synthetic polynucleotide
tttacttgtcagataccaggaatatrctatttttcataccacgtgcatgtg

SEQ ID NO: 4002 - DNA, 51 bp, Artificial Sequence
  Synthetic polynucleotide
gtattgtgaaaactctgtttttttcdggtcgaatgagtgatttgagtgtaa

SEQ ID NO: 4003 - DNA, 51 bp, Artificial Sequence
  Synthetic polynucleotide
cgtcagcgagctccccgccccccggvggctgcggtggaaatgctccccgga

SEQ ID NO: 4004 - DNA, 51 bp, Artificial Sequence
  Synthetic polynucleotide
aacagcaaaggcgtgagcctcttcgrcatcatcaaccctgagattatcact

SEQ ID NO: 4005 - DNA, 51 bp, Artificial Sequence
  Synthetic polynucleotide
gtgatttgcttcgaattaacgggtcdgattgctcacatcctgcccatgatg

SEQ ID NO: 4006 - DNA, 51 bp, Artificial Sequence
  Synthetic polynucleotide
ctttctggtgcttctgggactgctgrtggctctggtcagctggagcatgga

SEQ ID NO: 4007 - DNA, 51 bp, Artificial Sequence
  Synthetic polynucleotide
catctcactcgggcttatgccaaagrtgtaaaatttggtgcagatgcccga

SEQ ID NO: 4008 - DNA, 51 bp, Artificial Sequence
  Synthetic polynucleotide
  misc_feature (26)..(26): n is a, c, g, t or u
cactggcagcaacagtcttacctggnctctggaatccattctggtgccact

SEQ ID NO: 4009 - DNA, 51 bp, Artificial Sequence
  Synthetic polynucleotide
  misc_feature (26)..(26): n is a, c, g, t or u
ctctggaatccattctggtgccactnccacagctccttctctgagtggtaa

SEQ ID NO: 4010 - DNA, 51 bp, Artificial Sequence
  Synthetic polynucleotide
tttatgtaagaatgatataaccaaarggtatataatttggtaatgatgcta

SEQ ID NO: 4011 - DNA, 51 bp, Artificial Sequence
  Synthetic polynucleotide
gatctttaccggcttcagtctggggrggaggaggaagagcagatccacagc

SEQ ID NO: 4012 - DNA, 51 bp, Artificial Sequence
  Synthetic polynucleotide
caccacatcacacccgggtacccacraggtgaggaccccagcctcctccgt

SEQ ID NO: 4013 - DNA, 51 bp, Artificial Sequence
  Synthetic polynucleotide
gaagacctggcgcatgcacttattcrcgggcatccagatcatctgcctggc

SEQ ID NO: 4014 - DNA, 51 bp, Artificial Sequence
  Synthetic polynucleotide
ttcatccgctacctcatctcgtccarcgtcggggaagttgtctggtaggtc

SEQ ID NO: 4015 - DNA, 51 bp, Artificial Sequence
  Synthetic polynucleotide
ggccacataagcggggcccacatcavccctgccgtgactgtggcctgcctg

SEQ ID NO: 4016 - DNA, 51 bp, Artificial Sequence
  Synthetic polynucleotide
gacaccctcccgccctctcggccgcrgggcgctgatggacgagaccatgaa

SEQ ID NO: 4017 - DNA, 51 bp, Artificial Sequence
  Synthetic polynucleotide
cgcctcccacctgcgcaagctgcgtvagcggctcctccgcgatgccgatga

SEQ ID NO: 4018 - DNA, 51 bp, Artificial Sequence
  Synthetic polynucleotide
ttgggattacctgcgctgggtgcagrcactgtctgagcaggtgcaggagga

SEQ ID NO: 4019 - DNA, 51 bp, Artificial Sequence
  Synthetic polynucleotide
ggatttggaccctgaggtcagaccarcttcagccgtggctgcctgagacct

SEQ ID NO: 4020 - DNA, 51 bp, Artificial Sequence
  Synthetic polynucleotide
cctgaaagactactggagcaccgttraggacaagttctctgagttctggga

SEQ ID NO: 4021 - DNA, 51 bp, Artificial Sequence
  Synthetic polynucleotide
gtcgctgctgggcggagtgctccggvggtgaggcccggcacggccccgccc

SEQ ID NO: 4022 - DNA, 51 bp, Artificial Sequence
  Synthetic polynucleotide
tgcagagcaatccagagcggccatcracaaatgggtgtccaataagaccga

SEQ ID NO: 4023 - DNA, 51 bp, Artificial Sequence
  Synthetic polynucleotide
tacagacacccagaacatcttcttcrtgagcaaagtcaccaatcccaagca

SEQ ID NO: 4024 - DNA, 51 bp, Artificial Sequence
  Synthetic polynucleotide
tgcatggcatcttggggcggaaaggratcagagtcagatcaagaacaggag

SEQ ID NO: 4025 - DNA, 51 bp, Artificial Sequence
  Synthetic polynucleotide
cttcctgacccagcactatgatgccraaccacagggccgggatgacagata

SEQ ID NO: 4026 - DNA, 51 bp, Artificial Sequence
  Synthetic polynucleotide
accctgcaaagacatcaacacatttrttcatggcaacaagcgcagcatcaa

SEQ ID NO: 4027 - DNA, 51 bp, Artificial Sequence
  Synthetic polynucleotide
gggcggtgttgtcatagcgacagtgrtcgtcatcaccttggtgatgctgaa

SEQ ID NO: 4028 - DNA, 51 bp, Artificial Sequence
  Synthetic polynucleotide
tttgttttcaaggtgttctttgcagragatgtgggttcaaacaaaggtgca

SEQ ID NO: 4029 - DNA, 51 bp, Artificial Sequence
  Synthetic polynucleotide
catggtgggcggtgttgtcatagcgrcagtgatcgtcatcaccttggtgat

SEQ ID NO: 4030 - DNA, 51 bp, Artificial Sequence
  Synthetic polynucleotide
aaatgctttcttttctaggtcatccrtgcctggcttattatatcatctcta

SEQ ID NO: 4031 - DNA, 51 bp, Artificial Sequence
  Synthetic polynucleotide
gcactcaattctgaatgctgccatcrtgatcagtgtcattgttgtcatgac

SEQ ID NO: 4032 - DNA, 51 bp, Artificial Sequence
  Synthetic polynucleotide
  misc_feature (26)..(26): n is a, c, g, t or u
catcatgatcagtgtcattgttgtcntgactatcctcctggtggttctgta

SEQ ID NO: 4033 - DNA, 51 bp, Artificial Sequence
  Synthetic polynucleotide
gttgaaacagctcaggagagaaatgvaacgctttttccagctctcatttac

SEQ ID NO: 4034 - DNA, 51 bp, Artificial Sequence
  Synthetic polynucleotide
caagacactgttgcagagaatgatgrtggcgggttcagtgaggaatgggaa

SEQ ID NO: 4035 - DNA, 51 bp, Artificial Sequence
  Synthetic polynucleotide
ccccttcctcttctcttagggttggrtgggctgtctgagcgctgtgcccag

SEQ ID NO: 4036 - DNA, 51 bp, Artificial Sequence
  Synthetic polynucleotide
cattttgattggcgattttctttttdgggcagtagctcgcctgagccagag

SEQ ID NO: 4037 - DNA, 51 bp, Artificial Sequence
  Synthetic polynucleotide
aagcagctcttcttagggggtgtggrtcggcataagcagttctggcgctac

SEQ ID NO: 4038 - DNA, 51 bp, Artificial Sequence
  Synthetic polynucleotide
gtggcagtgagagacttcggcggacrtggctcccagcgtgccagcggcaga

SEQ ID NO: 4039 - DNA, 51 bp, Artificial Sequence
  Synthetic polynucleotide
aaccctccaaaagagcccatgaaagrtgacgtatgtaaactcaggacaaaa

SEQ ID NO: 4040 - DNA, 51 bp, Artificial Sequence
  Synthetic polynucleotide
gccacagaacccgtcatcgccttctrtgagaaacgtggcattgtgcgcaag

SEQ ID NO: 4041 - DNA, 51 bp, Artificial Sequence
  Synthetic polynucleotide
gaggcccccctcaatcccaaggccarccgcgagaagatgacccagatcatg

SEQ ID NO: 4042 - DNA, 51 bp, Artificial Sequence
  Synthetic polynucleotide
atgaaccagatagagcccggcgtgcrgtacaactacgtgtacgacgaggat

SEQ ID NO: 4043 - DNA, 51 bp, Artificial Sequence
  Synthetic polynucleotide
cagcaaatgtggattagcaagcaagrgtacgatgaggcaggcccatccatt

SEQ ID NO: 4044 - DNA, 51 bp, Artificial Sequence
  Synthetic polynucleotide
caaccgggagaagatgactcagatcrtgtttgagaccttcaatgtccctgc

SEQ ID NO: 4045 - DNA, 51 bp, Artificial Sequence
  Synthetic polynucleotide
tgattcttctcctctgtacattcagratccatttgaaacttctctcaacat

SEQ ID NO: 4046 - DNA, 51 bp, Artificial Sequence
  Synthetic polynucleotide
ttattgtcacttggatcaaatggctrtaagaagctactaaaagaaagaaag

SEQ ID NO: 4047 - DNA, 51 bp, Artificial Sequence
  Synthetic polynucleotide
gatcttcagcctgtactcgctggtcracgcctttcagtggatccagtacag

SEQ ID NO: 4048 - DNA, 51 bp, Artificial Sequence
  Synthetic polynucleotide
atatctcattatgattagtgccctcdtggccctggtgtttatcaagtacct

SEQ ID NO: 4049 - DNA, 51 bp, Artificial Sequence
  Synthetic polynucleotide
tgctccctctaccagctggagaactrctgcaactagacgcagcccgcaggc

SEQ ID NO: 4050 - DNA, 51 bp, Artificial Sequence
  Synthetic polynucleotide
gaagcaggccttcgacatcaccatcrtgatcctcatctgcctcaacatggt

SEQ ID NO: 4051 - DNA, 51 bp, Artificial Sequence
  Synthetic polynucleotide
cctcatctgcctcaacatggtcaccrtgatggtggagacagacaaccagag

SEQ ID NO: 4052 - DNA, 51 bp, Artificial Sequence
  Synthetic polynucleotide
ttcatacctcttatcttcctcccacvgctcctgggcaacgtgctggtctgt

SEQ ID NO: 4053 - DNA, 51 bp, Artificial Sequence
  Synthetic polynucleotide
gtggcccacaagaacatccgggagcrgggccgcttcctgcaggacgtgttc

SEQ ID NO: 4054 - DNA, 51 bp, Artificial Sequence
  Synthetic polynucleotide
agcccaccgcagggctgagaccctcrtcttcagcaagcatgcggtgatcgc

SEQ ID NO: 4055 - DNA, 51 bp, Artificial Sequence
  Synthetic polynucleotide
ggaaggcgtggtggaaaccacgggcvtcaccacccaggcccgcacctccta

SEQ ID NO: 4056 - DNA, 51 bp, Artificial Sequence
  Synthetic polynucleotide
gaggacggacgttactctgtggactrctccaagtttggcaacaccgtcaaa

SEQ ID NO: 4057 - DNA, 51 bp, Artificial Sequence
  Synthetic polynucleotide
cccatctgtggacccttttctgcccrgcacatccgggcaacgtttgatcct

SEQ ID NO: 4058 - DNA, 51 bp, Artificial Sequence
  Synthetic polynucleotide
atttatttcaggcaagtccaactcarggtccatgcctctggaatgggaaga

SEQ ID NO: 4059 - DNA, 51 bp, Artificial Sequence
  Synthetic polynucleotide
cccggggctgctgctgatggacacgrccttcagggacgcccaccagtcact

SEQ ID NO: 4060 - DNA, 51 bp, Artificial Sequence
  Synthetic polynucleotide
aatgggtttctttttttaccccccarttataggacgctggtcagaaacatt

SEQ ID NO: 4061 - DNA, 51 bp, Artificial Sequence
  Synthetic polynucleotide
attaaatcatcttttcttctcttttrggaattgcttcatgtttggctgttt

SEQ ID NO: 4062 - DNA, 51 bp, Artificial Sequence
  Synthetic polynucleotide
gagagagccaaaaaggccatgggctvccagccactagtgaccatggatgat

SEQ ID NO: 4063 - DNA, 51 bp, Artificial Sequence
  Synthetic polynucleotide
agaggcccaggggcaattcctcttcrttgtaggagaaggtgataagactat

SEQ ID NO: 4064 - DNA, 51 bp, Artificial Sequence
  Synthetic polynucleotide
attcagcatgctcatcatgtgcactrttctgacaaactgcatatttatgac

SEQ ID NO: 4065 - DNA, 51 bp, Artificial Sequence
  Synthetic polynucleotide
ctatgtcatgtacgacggcttctccrtgcagcggctggtgaagtgcaacgc

SEQ ID NO: 4066 - DNA, 51 bp, Artificial Sequence
  Synthetic polynucleotide
gaaccaaagcctgttggcttaaacartaaagagcgtttccgcacggccttc

SEQ ID NO: 4067 - DNA, 51 bp, Artificial Sequence
  Synthetic polynucleotide
agagatgattatgtgttcggccccartggggggtcgagctggatgagggag

SEQ ID NO: 4068 - DNA, 51 bp, Artificial Sequence
  Synthetic polynucleotide
aaagaggagtttgagacctatgcagrtgccctgtggtggggcctggtgagt

SEQ ID NO: 4069 - DNA, 51 bp, Artificial Sequence
  Synthetic polynucleotide
tgtaactctctctttttccccccacrgaaagcggtcctcatgatgttcata

SEQ ID NO: 4070 - DNA, 51 bp, Artificial Sequence
  Synthetic polynucleotide
cagaaccagtcaggcccatcgggtartaaccaaaaccaaggcaacatgcag

SEQ ID NO: 4071 - DNA, 51 bp, Artificial Sequence
  Synthetic polynucleotide
aatgccgaacctaagcacaatagcartagacagttagaaagaagtggaaga

SEQ ID NO: 4072 - DNA, 51 bp, Artificial Sequence
  Synthetic polynucleotide
atatgttgccagcaaaataggggggdaaatgctgctaggatttgggatcct

SEQ ID NO: 4073 - DNA, 51 bp, Artificial Sequence
  Synthetic polynucleotide
agactgtgttcaactcttgtcttccrgctaccactgccacgtgtaccccta

SEQ ID NO: 4074 - DNA, 51 bp, Artificial Sequence
  Synthetic polynucleotide
gttacgaggtacacagagggctatartcagagatcgagcagctttagagaa

SEQ ID NO: 4075 - DNA, 51 bp, Artificial Sequence
  Synthetic polynucleotide
agcaaaattataatattggaatatartatctggaacttatttctttatagg

SEQ ID NO: 4076 - DNA, 51 bp, Artificial Sequence
  Synthetic polynucleotide
attctgaaaaacaccagtgatctgcrtaagattttcaattccctctggaac

SEQ ID NO: 4077 - DNA, 51 bp, Artificial Sequence
  Synthetic polynucleotide
gtcagcctctgggacccttctccacrgccatgcaccgggccttccagacag

SEQ ID NO: 4078 - DNA, 51 bp, Artificial Sequence
  Synthetic polynucleotide
tgctgcccctgcatcctccaccttcrgggccatgagaagttgctgaggaca

SEQ ID NO: 4079 - DNA, 51 bp, Artificial Sequence
  Synthetic polynucleotide
cccggggcgcctcccgccaggcaccrtggtgcagaagtcgcgcaacggcgg

SEQ ID NO: 4080 - DNA, 51 bp, Artificial Sequence
  Synthetic polynucleotide
gtgttttccaccatcaaggagtatgrgaagagctcggagggggccctctac

SEQ ID NO: 4081 - DNA, 51 bp, Artificial Sequence
  Synthetic polynucleotide
cctgcgcttcctgcagattctgcggrtgatccgcatggaccggcggggagg

SEQ ID NO: 4082 - DNA, 51 bp, Artificial Sequence
  Synthetic polynucleotide
cagattctgcggatgatccgcatggrccggcggggaggcacctggaagctg

SEQ ID NO: 4083 - DNA, 51 bp, Artificial Sequence
  Synthetic polynucleotide
gtgtacttggcagagaagggggagarcgaccactttgacacctacgcggat

SEQ ID NO: 4084 - DNA, 51 bp, Artificial Sequence
  Synthetic polynucleotide
atgctttggggtctctgttcccggtrgagtggaccagatcgtggggcgggg

SEQ ID NO: 4085 - DNA, 51 bp, Artificial Sequence
  Synthetic polynucleotide
aaggagctgcgggagccggagaagartgaaactgcgtggagtcagcctggc

SEQ ID NO: 4086 - DNA, 51 bp, Artificial Sequence
  Synthetic polynucleotide
agaacttccattgatggcttcttttrgggtgaaccaggtagtataattatg

SEQ ID NO: 4087 - DNA, 51 bp, Artificial Sequence
  Synthetic polynucleotide
tcattttctttactcactttataacrgggcctacctggtcccactggtata

SEQ ID NO: 4088 - DNA, 51 bp, Artificial Sequence
  Synthetic polynucleotide
attttctcttttgtcttctcttcttrgggccctcctggtccaccaggactt

SEQ ID NO: 4089 - DNA, 51 bp, Artificial Sequence
  Synthetic polynucleotide
gccctatcatttctttgtatcctatrgggtaaaccaggcaaagatggagaa

SEQ ID NO: 4090 - DNA, 51 bp, Artificial Sequence
  Synthetic polynucleotide
ttgctatcctttctttatcttactcrggtgatgagatatgtgaaccaggcc

SEQ ID NO: 4091 - DNA, 51 bp, Artificial Sequence
  Synthetic polynucleotide
ttctttgaacgttttcctttcaatarctgctgtttctccataggtgaccct

SEQ ID NO: 4092 - DNA, 51 bp, Artificial Sequence
  Synthetic polynucleotide
gttaaaaaatgacttatcattttacrggctttcctggaattccaggacctc

SEQ ID NO: 4093 - DNA, 51 bp, Artificial Sequence
  Synthetic polynucleotide
gcttagatgggctccctggaccaaarggtatggaggctgtcactgcatctc

SEQ ID NO: 4094 - DNA, 51 bp, Artificial Sequence
  Synthetic polynucleotide
cagatacatcttttaaaactgcttcrgtacttattaatattgatattgtat

SEQ ID NO: 4095 - DNA, 51 bp, Artificial Sequence
  Synthetic polynucleotide
attcttcaaaggtaccaaaggtgaartgggtatgatgggacctccaggccc

SEQ ID NO: 4096 - DNA, 51 bp, Artificial Sequence
  Synthetic polynucleotide
aggacctttgggaattcctggcaggrgtggtgtacctggtcttaaaggtaa

SEQ ID NO: 4097 - DNA, 51 bp, Artificial Sequence
  Synthetic polynucleotide
atattatatatcacatattttcaacrgggcctcagggtgtggaagggcctc

SEQ ID NO: 4098 - DNA, 51 bp, Artificial Sequence
  Synthetic polynucleotide
aactgggtgtaacctgctgtactcarttttttaggtggtggaggtcatcct

SEQ ID NO: 4099 - DNA, 51 bp, Artificial Sequence
  Synthetic polynucleotide
tcttctaattatactttactttcatrggccaaaagggtgatggaggattac

SEQ ID NO: 4100 - DNA, 51 bp, Artificial Sequence
  Synthetic polynucleotide
gtaacattaatgattttatttattcrgggtaatcctggccggccgggtctc

SEQ ID NO: 4101 - DNA, 51 bp, Artificial Sequence
  Synthetic polynucleotide
ataaaactgtatgtaccttctgtgcdggcatgaaaggacccagtggagtac

SEQ ID NO: 4102 - DNA, 51 bp, Artificial Sequence
  Synthetic polynucleotide
ggatgggattctctgtggattggttrttccttcatgatggtattttacact

SEQ ID NO: 4103 - DNA, 51 bp, Artificial Sequence
  Synthetic polynucleotide
ctgattgtcttatttcttatttcccrgtaaacctcagtcagaaacgctgaa

SEQ ID NO: 4104 - DNA, 51 bp, Artificial Sequence
  Synthetic polynucleotide
tttcatttgttttcccctttaaacarttaagatctctcaggattaacactg

SEQ ID NO: 4105 - DNA, 51 bp, Artificial Sequence
  Synthetic polynucleotide
tattggtgttccattgcttactttgraatggatgttcaggtaggagagaca

SEQ ID NO: 4106 - DNA, 51 bp, Artificial Sequence
  Synthetic polynucleotide
ccactgctaccacaagtttgcccacvagccacccatctcctcagctgagat

SEQ ID NO: 4107 - DNA, 51 bp, Artificial Sequence
  Synthetic polynucleotide
ctgtcagagttcaacgtcctgaagcrggtcaaccacccacatgtcatcaaa

SEQ ID NO: 4108 - DNA, 51 bp, Artificial Sequence
  Synthetic polynucleotide
tattatgtggctgccgtgtatgagcrtccatccatcctgagtctgaaccct

SEQ ID NO: 4109 - DNA, 51 bp, Artificial Sequence
  Synthetic polynucleotide
ctcatgaaccagaaccttgacatctrtgaacagcaagtgatgactgcagcc

SEQ ID NO: 4110 - DNA, 51 bp, Artificial Sequence
  Synthetic polynucleotide
ccagaagatggcattcatggattcarctttacaagaacatccatttatcca

SEQ ID NO: 4111 - DNA, 51 bp, Artificial Sequence
  Synthetic polynucleotide
tggcattcatggattcaactttacargaacatccatttatccatttttgga

SEQ ID NO: 4112 - DNA, 51 bp, Artificial Sequence
  Synthetic polynucleotide
aggggagatatgttcttggtggccartcttgggacaaaggagccttgtcat

SEQ ID NO: 4113 - DNA, 51 bp, Artificial Sequence
  Synthetic polynucleotide
cccaaaagatgggagataccagttcracacaaatgtcgtgttcagcaataa

SEQ ID NO: 4114 - DNA, 51 bp, Artificial Sequence
  Synthetic polynucleotide
ccaaaagatgggagataccagttcarcacaaatgtcgtgttcagcaataat

SEQ ID NO: 4115 - DNA, 51 bp, Artificial Sequence
  Synthetic polynucleotide
cttgttgaccgctaccgtaaacacarcctctactttgaggcagcattcgat

SEQ ID NO: 4116 - DNA, 51 bp, Artificial Sequence
  Synthetic polynucleotide
gaaagcttttgctgttgcctttggcrtcaacgttctggcagctaatgtcca

SEQ ID NO: 4117 - DNA, 51 bp, Artificial Sequence
  Synthetic polynucleotide
tttcactctgagatgatgtatgacartttcaccctggtccctgtctgggga

SEQ ID NO: 4118 - DNA, 51 bp, Artificial Sequence
  Synthetic polynucleotide
aggcccaccttatccaaagagctgtrtgccctgggggtctttgatgggctt

SEQ ID NO: 4119 - DNA, 51 bp, Artificial Sequence
  Synthetic polynucleotide
acggcggctctctatgggcgcttgtrtgagagggactaggaaaagtgtgtg

SEQ ID NO: 4120 - DNA, 51 bp, Artificial Sequence
  Synthetic polynucleotide
ttccagcggatcccccggtggcctcrtgtcgcgcagtggaaccgatcctca

SEQ ID NO: 4121 - DNA, 51 bp, Artificial Sequence
  Synthetic polynucleotide
gtcagaggcggacgccgcagcagcarccttccgggcaaacggtaactgcac

SEQ ID NO: 4122 - DNA, 51 bp, Artificial Sequence
  Synthetic polynucleotide
gtgcttctagcctatccttgtcggtrggtgaatccccagtacgatagcacc

SEQ ID NO: 4123 - DNA, 51 bp, Artificial Sequence
  Synthetic polynucleotide
tacgatagcaccttcctgtttgacarcgacttcccagctctgcagcctgat

SEQ ID NO: 4124 - DNA, 51 bp, Artificial Sequence
  Synthetic polynucleotide
tttgacaacgacttcccagctctgcrgcctgatgcccccagtccaggtaac

SEQ ID NO: 4125 - DNA, 51 bp, Artificial Sequence
  Synthetic polynucleotide
atcttttctcccgtcaccacccagtraggtcatgtgcttccacccctggtc

SEQ ID NO: 4126 - DNA, 51 bp, Artificial Sequence
  Synthetic polynucleotide
ctggtcggatgtaacgctgccactcrtgtcggtccctgagatccgggctgt

SEQ ID NO: 4127 - DNA, 51 bp, Artificial Sequence
  Synthetic polynucleotide
ttcttctctgcttttgccccttgacrggtatgggccagcagtttcctgcca

SEQ ID NO: 4128 - DNA, 51 bp, Artificial Sequence
  Synthetic polynucleotide
ttttgccccttgacaggtatgggccrgcagtttcctgccagatattgccca

SEQ ID NO: 4129 - DNA, 51 bp, Artificial Sequence
  Synthetic polynucleotide
cgtgaggagcgatctcagcaggcctvtaagagtcagcatggagagcccctg

SEQ ID NO: 4130 - DNA, 51 bp, Artificial Sequence
  Synthetic polynucleotide
gtccccttctgggcaacatggccctvccagacactgctgctgcccgtcggc

SEQ ID NO: 4131 - DNA, 51 bp, Artificial Sequence
  Synthetic polynucleotide
cggctacctgagctgacccctgctgrgcgtgatggtcagtctcccaagtag

SEQ ID NO: 4132 - DNA, 51 bp, Artificial Sequence
  Synthetic polynucleotide
aggctgagagtcaggctctgattccrgatctagcctccatcatgaagaagc

SEQ ID NO: 4133 - DNA, 51 bp, Artificial Sequence
  Synthetic polynucleotide
tccatcatgaagaagctcttgaccargtatgacaacctctttgagacgtcc

SEQ ID NO: 4134 - DNA, 51 bp, Artificial Sequence
  Synthetic polynucleotide
cattggcagctgcacgctcattactrccctccgctcctgcgctctgccact

SEQ ID NO: 4135 - DNA, 51 bp, Artificial Sequence
  Synthetic polynucleotide
ctcctgcgctctgccactgtccggarattcatggttggctacgaaatgctt

SEQ ID NO: 4136 - DNA, 51 bp, Artificial Sequence
  Synthetic polynucleotide
gcttgctcaggctcagagggacctcrcccctgagcaggtcaggactcagaa

SEQ ID NO: 4137 - DNA, 51 bp, Artificial Sequence
  Synthetic polynucleotide
gcagaaggacagggagacagcaaccrtcgcctgaccacgccgaccacaggg

SEQ ID NO: 4138 - DNA, 51 bp, Artificial Sequence
  Synthetic polynucleotide
gttgcttgaaaataaagcagttaaaraggcaggtgtaggaattgaaggaga

SEQ ID NO: 4139 - DNA, 51 bp, Artificial Sequence
  Synthetic polynucleotide
cttacccagacacactccatcgcctygtcgattttggaatgtctgggctca

SEQ ID NO: 4140 - DNA, 51 bp, Artificial Sequence
  Synthetic polynucleotide
acagcgggggagagcgagagccaccrcacatcactgctggtgccctggccc

SEQ ID NO: 4141 - DNA, 51 bp, Artificial Sequence
  Synthetic polynucleotide
caaattgcggcacatgtcataagtgrggccagcagtaaaacaacatctggt

SEQ ID NO: 4142 - DNA, 51 bp, Artificial Sequence
  Synthetic polynucleotide
cccacccaggtggccatccagctgartgacactcaccctgcactcgcgatc

SEQ ID NO: 4143 - DNA, 51 bp, Artificial Sequence
  Synthetic polynucleotide
ccccttggggagggctgcttcggccrggtggtcatggcggaggccatcggc

SEQ ID NO: 4144 - DNA, 51 bp, Artificial Sequence
  Synthetic polynucleotide
tgatatcgccgcgctcgtcgtcgacvacggctccggcatgtgcaaggccgg

SEQ ID NO: 4145 - DNA, 51 bp, Artificial Sequence
  Synthetic polynucleotide
tgggggaagagactgaccttcgtggyggaagctcctcacggtgttggcccg

SEQ ID NO: 4146 - DNA, 51 bp, Artificial Sequence
  Synthetic polynucleotide
cagctggcccgacctggtgtccccarggtgatccctacccctaccatgcct

SEQ ID NO: 4147 - DNA, 51 bp, Artificial Sequence
  Synthetic polynucleotide
agaagaagtttgtgctacagaaactrctatgctgacaaccagacctgtgat

SEQ ID NO: 4148 - DNA, 51 bp, Artificial Sequence
  Synthetic polynucleotide
ctagatatgagaagaagtttgtgctrcagaaactactatgctgacaaccag

SEQ ID NO: 4149 - DNA, 51 bp, Artificial Sequence
  Synthetic polynucleotide
agaagtttgtgctacagaaactactrtgctgacaaccagacctgtgatgga

SEQ ID NO: 4150 - DNA, 51 bp, Artificial Sequence
  Synthetic polynucleotide
ttacttaaactaccatgttcctcgarcgagacgagaaatcctggagaccct

SEQ ID NO: 4151 - DNA, 51 bp, Artificial Sequence
  Synthetic polynucleotide
ctggaggctgagtttcatttcacacrcctcattatgaccttcaaggtgcct

SEQ ID NO: 4152 - DNA, 51 bp, Artificial Sequence
  Synthetic polynucleotide
gacttaagggacctgtgtgcgtggcrggtaagaccctcggagctggagcct

SEQ ID NO: 4153 - DNA, 51 bp, Artificial Sequence
  Synthetic polynucleotide
ggggcgccccggcgccgcaagctctrctgcgccacgaagtaccacctccag

SEQ ID NO: 4154 - DNA, 51 bp, Artificial Sequence
  Synthetic polynucleotide
gccatgaacaagaggggacgactctrtgcttcggtgagtccaggctgtcac

SEQ ID NO: 4155 - DNA, 51 bp, Artificial Sequence
  Synthetic polynucleotide
taatcaaaggaacaatatgaattatrctgtgagatgggctccacattccaa

SEQ ID NO: 4156 - DNA, 51 bp, Artificial Sequence
  Synthetic polynucleotide
tgtgaatgccccgaaggctacagatrtaatctcaaatcaaagtcttgtgaa

SEQ ID NO: 4157 - DNA, 51 bp, Artificial Sequence
  Synthetic polynucleotide
taccagaagtattgtgggaaaccttrcacatatgcgtatggacttggcttg

SEQ ID NO: 4158 - DNA, 51 bp, Artificial Sequence
  Synthetic polynucleotide
tgaatcttttcattggtgtcatcatrgataacttcaaccaacagaaaaaga

SEQ ID NO: 4159 - DNA, 51 bp, Artificial Sequence
  Synthetic polynucleotide
gtcagtgaagaagctttctgatgtcrtgatcttgactgtgttctgtctaag

SEQ ID NO: 4160 - DNA, 51 bp, Artificial Sequence
  Synthetic polynucleotide
ttctgccacctctgtacaaaagacarttttacttgtgtgacagatgggctc

SEQ ID NO: 4161 - DNA, 51 bp, Artificial Sequence
  Synthetic polynucleotide
tttgatcaattagatcttgtcacatrtgaagaagtagtaaaactgccagca

SEQ ID NO: 4162 - DNA, 51 bp, Artificial Sequence
  Synthetic polynucleotide
ggtggcagtgtacttttggctgccartgtgaccctgggactctggatggtt

SEQ ID NO: 4163 - DNA, 51 bp, Artificial Sequence
  Synthetic polynucleotide
acgaatgatttcgactcattaaattrtgataatcatatttaccaaatgccc

SEQ ID NO: 4164 - DNA, 51 bp, Artificial Sequence
  Synthetic polynucleotide
gaatttgcaattcaatatgaaaatcrcctcggagctggtaaaaagaggcct

SEQ ID NO: 4165 - DNA, 51 bp, Artificial Sequence
  Synthetic polynucleotide
gtagcttacctcctcaaagcaatacrctgaaaatgtttagacgggctcaca

SEQ ID NO: 4166 - DNA, 51 bp, Artificial Sequence
  Synthetic polynucleotide
ctgattgagatggctggtgactgcaytggtacccatgggactgagtgtggc

SEQ ID NO: 4167 - DNA, 51 bp, Artificial Sequence
  Synthetic polynucleotide
ctcctgactctggatatcttgaaacrtggcaagcgcttccatgccaccgtc

SEQ ID NO: 4168 - DNA, 51 bp, Artificial Sequence
  Synthetic polynucleotide
gaagcgggtggaagatgtccttggcragggctgggagaatcacgtggaggg

SEQ ID NO: 4169 - DNA, 51 bp, Artificial Sequence
  Synthetic polynucleotide
ctaagaataaccaatcaggtaatctrcttgaatccaccaattgaagagtgc

SEQ ID NO: 4170 - DNA, 51 bp, Artificial Sequence
  Synthetic polynucleotide
actgtaggggtgctctgggtttggghagcactgggcactgagccaggagtc

SEQ ID NO: 4171 - DNA, 51 bp, Artificial Sequence
  Synthetic polynucleotide
atgctctcttccttccctccaggctvcttgtacctggccattgagtacgcg

SEQ ID NO: 4172 - DNA, 51 bp, Artificial Sequence
  Synthetic polynucleotide
agatggcagtgtgaagagagaagacrtattctacacttcaaaggtactgtg

SEQ ID NO: 4173 - DNA, 51 bp, Artificial Sequence
  Synthetic polynucleotide
acaagaacagctgttactcaagaagrtgtatttaatgcttgacaataagag

SEQ ID NO: 4174 - DNA, 51 bp, Artificial Sequence
  Synthetic polynucleotide
gagcatgaaatcaagagcctggaagrtttacaagatgaatatgacttcaaa

SEQ ID NO: 4175 - DNA, 51 bp, Artificial Sequence
  Synthetic polynucleotide
gttggaggaattggaacagaaatacrcctacgaacatgaccctatcacaaa

SEQ ID NO: 4176 - DNA, 51 bp, Artificial Sequence
  Synthetic polynucleotide
cctccaggtccccaggcctcttgcartgcggaaagaggggatccaaaccag

SEQ ID NO: 4177 - DNA, 51 bp, Artificial Sequence
  Synthetic polynucleotide
catgtacattgccatcatcctggagracttcagtgtagccacagaggaaag

SEQ ID NO: 4178 - DNA, 51 bp, Artificial Sequence
  Synthetic polynucleotide
tacatctcacggccgcgccgggtggrgctggctgtcatgttgaacttgacc

SEQ ID NO: 4179 - DNA, 51 bp, Artificial Sequence
  Synthetic polynucleotide
cattgggtatggcttccgagtcatcrcagagaagtgtccagaggggattat

SEQ ID NO: 4180 - DNA, 51 bp, Artificial Sequence
  Synthetic polynucleotide
acggtcgagggggcagagaaggaagrtgagggcgtctacacggtcacagtg

SEQ ID NO: 4181 - DNA, 51 bp, Artificial Sequence
  Synthetic polynucleotide
tgttgatgaccttcgtcgcttatgcrtactcaggatgagttttgtgaaagg

SEQ ID NO: 4182 - DNA, 51 bp, Artificial Sequence
  Synthetic polynucleotide
ttgatgaccttcgtcgcttatgcatrctcaggatgagttttgtgaaaggct

SEQ ID NO: 4183 - DNA, 51 bp, Artificial Sequence
  Synthetic polynucleotide
tatcaatttttgactgctttttcacrattgatctctcgaatttgtcattct

SEQ ID NO: 4184 - DNA, 51 bp, Artificial Sequence
  Synthetic polynucleotide
ccccaaccgcccccaggtttggttcragaatcgtcgggccaaatggagaaa

SEQ ID NO: 4185 - DNA, 51 bp, Artificial Sequence
  Synthetic polynucleotide
ctgtgccaactgtcacaccacaactrccaccttatggcgcagaaacgccga

SEQ ID NO: 4186 - DNA, 51 bp, Artificial Sequence
  Synthetic polynucleotide
aaacgccgagggtgaacccgtgtgcvatgcttgtggactctacatgaaact

SEQ ID NO: 4187 - DNA, 51 bp, Artificial Sequence
  Synthetic polynucleotide
cttgtggaagccctgaagccagagtrtgtggcacctcttgtcctttggctt

SEQ ID NO: 4188 - DNA, 51 bp, Artificial Sequence
  Synthetic polynucleotide
gcctgtgacagcaacattaatgcggrgaccatcattggccttgttcgggta

SEQ ID NO: 4189 - DNA, 51 bp, Artificial Sequence
  Synthetic polynucleotide
catcataaaaaccaaacacttctctrtaatctttttgacatttctcagtct

SEQ ID NO: 4190 - DNA, 51 bp, Artificial Sequence
  Synthetic polynucleotide
gctccactaggttggccagcatgccygcgaagaggtagagacccttgagca

SEQ ID NO: 4191 - DNA, 51 bp, Artificial Sequence
  Synthetic polynucleotide
tcagggaggtggcgtggctcgggccyggggaaaaacagagtcagggcccaa

SEQ ID NO: 4192 - DNA, 51 bp, Artificial Sequence
  Synthetic polynucleotide
tacttgcccacctggcagaaaatctrcttctacagttggggctgacagacc

SEQ ID NO: 4193 - DNA, 51 bp, Artificial Sequence
  Synthetic polynucleotide
ttgatcctgagctgaccgggtagccrtggccttgcggctcctgaagctggc

SEQ ID NO: 4194 - DNA, 51 bp, Artificial Sequence
  Synthetic polynucleotide
tggttgtacagcagtcgcctgctgcrgtactcagatgccttggagcacttg

SEQ ID NO: 4195 - DNA, 51 bp, Artificial Sequence
  Synthetic polynucleotide
tatttttcagattgttcagtttggcdtgaatgaaaaggttgggcaaatctc

SEQ ID NO: 4196 - DNA, 51 bp, Artificial Sequence
  Synthetic polynucleotide
tatttaccaaaagaacaatacctctrtaccaaagagcagctcttggatagg

SEQ ID NO: 4197 - DNA, 51 bp, Artificial Sequence
  Synthetic polynucleotide
caaaattctttgtatcttttcatctrgctaaaagaccagcttcaggacaaa

SEQ ID NO: 4198 - DNA, 51 bp, Artificial Sequence
  Synthetic polynucleotide
gaatctgtttcactgtcacacaggcragtgccttaattacagccttgtgtg

SEQ ID NO: 4199 - DNA, 51 bp, Artificial Sequence
  Synthetic polynucleotide
catgaatttgccctacaacagtacargttatccaaattattttggccacag

SEQ ID NO: 4200 - DNA, 51 bp, Artificial Sequence
  Synthetic polynucleotide
agcttacatgcagaatcctaatgccrtcatactgtgtattcaaggtaaatc

SEQ ID NO: 4201 - DNA, 51 bp, Artificial Sequence
  Synthetic polynucleotide
cgtgggctgaagctgacggggacctrtagcatcatgatccagaaggtacgg

SEQ ID NO: 4202 - DNA, 51 bp, Artificial Sequence
  Synthetic polynucleotide
tctacggggaagacctgcctgcccarggccttgctgaacctgagcaatggc

SEQ ID NO: 4203 - DNA, 51 bp, Artificial Sequence
  Synthetic polynucleotide
ggcccgtgggcgcttcttccagcccraggatgaggggggctacttctactt

SEQ ID NO: 4204 - DNA, 51 bp, Artificial Sequence
  Synthetic polynucleotide
gtctcggattgcaaagacggggaggrcgagtaccgctgtggtaaggtcatg

SEQ ID NO: 4205 - DNA, 51 bp, Artificial Sequence
  Synthetic polynucleotide
gatggatatctgagaatattcctatrgtgataacaaccgaacctacagatg

SEQ ID NO: 4206 - DNA, 51 bp, Artificial Sequence
  Synthetic polynucleotide
gtcctccagtggcctggacctgcccrtgaaggtggtggacatgttcgggtg

SEQ ID NO: 4207 - DNA, 51 bp, Artificial Sequence
  Synthetic polynucleotide
gctaatggtttggggttttattttcrggttactggagacaatgttaattcc

SEQ ID NO: 4208 - DNA, 51 bp, Artificial Sequence
  Synthetic polynucleotide
taccttctctcattttctcccagctrcatccgatactcccagatctgtgca

SEQ ID NO: 4209 - DNA, 51 bp, Artificial Sequence
  Synthetic polynucleotide
cacaacaccagacccgtcgtaggtaytggaagtactgaccaatgttccaaa

SEQ ID NO: 4210 - DNA, 51 bp, Artificial Sequence
  Synthetic polynucleotide
ctctgactgtacccccatgtttaggrggcagccatggccaagctggccgcc

SEQ ID NO: 4211 - DNA, 51 bp, Artificial Sequence
  Synthetic polynucleotide
gggggaccctactggcaggaggtcarggtaacagcataaatcttcattgtt

SEQ ID NO: 4212 - DNA, 51 bp, Artificial Sequence
  Synthetic polynucleotide
gaacccgaagctggagaaagcggagrtattggagttcgccgtgggctactt

SEQ ID NO: 4213 - DNA, 51 bp, Artificial Sequence
  Synthetic polynucleotide
ggacgggaaccgtcgctatgccaagragtgccaggtggagcggcaggaagg

SEQ ID NO: 4214 - DNA, 51 bp, Artificial Sequence
  Synthetic polynucleotide
ctcaaatttggattcagtagcagagratacgtcttgctccatgagtcgtcg

SEQ ID NO: 4215 - DNA, 51 bp, Artificial Sequence
  Synthetic polynucleotide
aattgaacacctctcctttcccaagrtaagagatcatctttaagaaaaggc

SEQ ID NO: 4216 - DNA, 51 bp, Artificial Sequence
  Synthetic polynucleotide
gtttttgttttccctcaaaggttcarcatacaaatttagggtcattgccat

SEQ ID NO: 4217 - DNA, 51 bp, Artificial Sequence
  Synthetic polynucleotide
agaccctgaggccgaggggggaacartggggcccttgagggcccctcctcc

SEQ ID NO: 4218 - DNA, 51 bp, Artificial Sequence
  Synthetic polynucleotide
tggatcctacccctcttttttctgcrgttgctgttctctgtgtctgtgact

SEQ ID NO: 4219 - DNA, 51 bp, Artificial Sequence
  Synthetic polynucleotide
ctcgaagacctggtgtttgtaggcartcccttggaagagaaacattctgct

SEQ ID NO: 4220 - DNA, 51 bp, Artificial Sequence
  Synthetic polynucleotide
agttttccctttattgctgaacggtytgaagcgtgcagagatggcatagaa

SEQ ID NO: 4221 - DNA, 51 bp, Artificial Sequence
  Synthetic polynucleotide
aatggacaagtataattttgatacartgatatatgtggtaagtaatcagaa

SEQ ID NO: 4222 - DNA, 51 bp, Artificial Sequence
  Synthetic polynucleotide
ctctgcgcgctccgggatccataccyggcaagcaatagcgcggcgaaagcc

SEQ ID NO: 4223 - DNA, 51 bp, Artificial Sequence
  Synthetic polynucleotide
tgtctcctgcaggaccggccgcagcrtggacgctcccaggcggtttccgac

SEQ ID NO: 4224 - DNA, 51 bp, Artificial Sequence
  Synthetic polynucleotide
taatcgtgccagttccaacataatcygtagagcaaagggctagattcatca

SEQ ID NO: 4225 - DNA, 51 bp, Artificial Sequence
  Synthetic polynucleotide
ttcgtccttgaccgcagggtcctggrtatgcccacccaagaactgggcctc

SEQ ID NO: 4226 - DNA, 51 bp, Artificial Sequence
  Synthetic polynucleotide
aacgggtatgagtgtgagtggcgctrtaacagctgtgcacctgcctgtcaa

SEQ ID NO: 4227 - DNA, 51 bp, Artificial Sequence
  Synthetic polynucleotide
accttacctatccacagcttcttgtytgtcatggtcaaaatcttgtaccat

SEQ ID NO: 4228 - DNA, 51 bp, Artificial Sequence
  Synthetic polynucleotide
gctgagaaatgtcttactctcttgcrgggagaatgctgttgaaagacttga

SEQ ID NO: 4229 - DNA, 51 bp, Artificial Sequence
  Synthetic polynucleotide
cggaccctggaggacctgacagaagrcagcatgtggtgggtcctgccccca

SEQ ID NO: 4230 - DNA, 51 bp, Artificial Sequence
  Synthetic polynucleotide
gaagtgacgtcaggcggccgcggagrtggaggatttgctcgacttggacga

SEQ ID NO: 4231 - DNA, 51 bp, Artificial Sequence
  Synthetic polynucleotide
aacatttggatcaacctcacaatcargtagtttttcaaaaattcataagcg

SEQ ID NO: 4232 - DNA, 51 bp, Artificial Sequence
  Synthetic polynucleotide
gtagtaaaaggacacatcttacataygtaggtagctgattttttggatgat

SEQ ID NO: 4233 - DNA, 51 bp, Artificial Sequence
  Synthetic polynucleotide
tttcaggaaggagaaaacattttctrtttggcagttgaagatatagaaaca

SEQ ID NO: 4234 - DNA, 51 bp, Artificial Sequence
  Synthetic polynucleotide
ctatagttctctgggggacttaccaytggggtctttcctgaatagtgtatt

SEQ ID NO: 4235 - DNA, 51 bp, Artificial Sequence
  Synthetic polynucleotide
accaactgagtttttcttccacacartggccggccgggaaggtctagtcga

SEQ ID NO: 4236 - DNA, 51 bp, Artificial Sequence
  Synthetic polynucleotide
tactggatctcggcccgcagctcctyggtgacgtagttcaccagcatggcc

SEQ ID NO: 4237 - DNA, 51 bp, Artificial Sequence
  Synthetic polynucleotide
tactttgccctcagcatctcccttcrtgtctgggtcatggtaagagtggca

SEQ ID NO: 4238 - DNA, 51 bp, Artificial Sequence
  Synthetic polynucleotide
ttcctccccacagcagcagtgttgtrctgctacttctataaacggacagcc

SEQ ID NO: 4239 - DNA, 51 bp, Artificial Sequence
  Synthetic polynucleotide
aaaggaacacgggcatatgcctgccrgtgtagctggagaactattgaagaa

SEQ ID NO: 4240 - DNA, 51 bp, Artificial Sequence
  Synthetic polynucleotide
cccaagtggccgcaggcagatggatrtgtgggggacacgcagcaggtgagg

SEQ ID NO: 4241 - DNA, 51 bp, Artificial Sequence
  Synthetic polynucleotide
agcagtgagacatactttcttggtgyccacagaggtatacagaagcaccat

SEQ ID NO: 4242 - DNA, 51 bp, Artificial Sequence
  Synthetic polynucleotide
agcctgcaggaggagctgaaccaggraaaggggcagaaggaggtgctgctg

SEQ ID NO: 4243 - DNA, 51 bp, Artificial Sequence
  Synthetic polynucleotide
caaggacaagcccgtttctttccacragtgaggaccctgcgcgcctcgcgg

SEQ ID NO: 4244 - DNA, 51 bp, Artificial Sequence
  Synthetic polynucleotide
aacaaacggcaaatgagtcgcatttrccccaagggaggccgagtcgattcc

SEQ ID NO: 4245 - DNA, 51 bp, Artificial Sequence
  Synthetic polynucleotide
cactacttcatcagttcttcccatavcacttatctcactggcagacagttc

SEQ ID NO: 4246 - DNA, 51 bp, Artificial Sequence
  Synthetic polynucleotide
gggagacggcgggatctctttcgccrtggctgccgggccgatctccgagcg

SEQ ID NO: 4247 - DNA, 51 bp, Artificial Sequence
  Synthetic polynucleotide
tgggacatagaacgaggagagaattrtatactgagtccagatgagaagttt

SEQ ID NO: 4248 - DNA, 51 bp, Artificial Sequence
  Synthetic polynucleotide
gacagaagacgaagtggagaagttgrtggctgggcaagaggactccaatgg

SEQ ID NO: 4249 - DNA, 51 bp, Artificial Sequence
  Synthetic polynucleotide
atatctcagcttctaagagagagctrtttagctgaaaccagacatcgggga

SEQ ID NO: 4250 - DNA, 51 bp, Artificial Sequence
  Synthetic polynucleotide
tgagtttgcggagaggtcagtaactraattggagaaaagcattgatgactt

SEQ ID NO: 4251 - DNA, 51 bp, Artificial Sequence
  Synthetic polynucleotide
agctgcttacacagagaagtctgctrcatatgtcaacactgagggtagagc

SEQ ID NO: 4252 - DNA, 51 bp, Artificial Sequence
  Synthetic polynucleotide
aattccttttattgaaacatcagcaragacaagacaggtaagtaacactga

SEQ ID NO: 4253 - DNA, 51 bp, Artificial Sequence
  Synthetic polynucleotide
gaagatgaactcatctgcaaaaacahcacgtaggaagcgaaagcaactgta

SEQ ID NO: 4254 - DNA, 51 bp, Artificial Sequence
  Synthetic polynucleotide
ggcacccgtcggaagtccagaatccygcaagagaggaagctctgttccatc

SEQ ID NO: 4255 - DNA, 51 bp, Artificial Sequence
  Synthetic polynucleotide
aggctttctcatcttgactgtaatcygcaaaggaggagaagggcaatgaga

SEQ ID NO: 4256 - DNA, 51 bp, Artificial Sequence
  Synthetic polynucleotide
ctgcttcacatcttcacggtcaacaracagctggggcccaagatcgtcatc

SEQ ID NO: 4257 - DNA, 51 bp, Artificial Sequence
  Synthetic polynucleotide
gctgtcgcccgcagatttcttcgccragcgcaagagatcagcgcctgagaa

SEQ ID NO: 4258 - DNA, 51 bp, Artificial Sequence
  Synthetic polynucleotide
agtgtgcctctgtttttcctttgacrggaaatcgatgattgtctggtccaa

SEQ ID NO: 4259 - DNA, 51 bp, Artificial Sequence
  Synthetic polynucleotide
tgtgacattcttcgacacgccccccrtgctctttgtgttcattgccctggg

SEQ ID NO: 4260 - DNA, 51 bp, Artificial Sequence
  Synthetic polynucleotide
gtccacacccatgctctgcagcgtgygcacagccagggcagcctcctgctt

SEQ ID NO: 4261 - DNA, 51 bp, Artificial Sequence
  Synthetic polynucleotide
acattttgtgtttatgttatttgcartgttttctatggaaatatttcacag

SEQ ID NO: 4262 - DNA, 51 bp, Artificial Sequence
  Synthetic polynucleotide
gctcgaggcctggcttgagatgaggytctcattgtgaaaccactgtgtgga

SEQ ID NO: 4263 - DNA, 51 bp, Artificial Sequence
  Synthetic polynucleotide
tatggctgcgtggtgaacttgcggargacagtggtgaacttccctgtagaa

SEQ ID NO: 4264 - DNA, 51 bp, Artificial Sequence
  Synthetic polynucleotide
gttgatcaaaccaccgtggacacctyctttgcccatcagcaggactagcgc

SEQ ID NO: 4265 - DNA, 51 bp, Artificial Sequence
  Synthetic polynucleotide
gttgcacagaagtcatatggaaatgraaaaaggtaagattatttttctggt

SEQ ID NO: 4266 - DNA, 51 bp, Artificial Sequence
  Synthetic polynucleotide
gataaaagtcatctccaaaccttccraaaagaagcagtcattgaaaaatgc

SEQ ID NO: 4267 - DNA, 51 bp, Artificial Sequence
  Synthetic polynucleotide
ggtcatcctggcccctttgcagagaracactgcagaagctaagacatagga

SEQ ID NO: 4268 - DNA, 51 bp, Artificial Sequence
  Synthetic polynucleotide
cacagaaacatcaaaaagtaggtccygtttcttttcagaagctcgatcaca

SEQ ID NO: 4269 - DNA, 51 bp, Artificial Sequence
  Synthetic polynucleotide
aaaatctctagtgttctaagctacarcgaaaaactgctgaaagaaaaggaa

SEQ ID NO: 4270 - DNA, 51 bp, Artificial Sequence
  Synthetic polynucleotide
gacatttcccctcaagcaccaacacrttttctggtgatacccaagaaacat

SEQ ID NO: 4271 - DNA, 51 bp, Artificial Sequence
  Synthetic polynucleotide
gagctgggtgaagcagctgatgaggyagatgcacacaaaggcattctggac

SEQ ID NO: 4272 - DNA, 51 bp, Artificial Sequence
  Synthetic polynucleotide
gctggggccaactggaaccattggcrgctgcacgctcattactaccctccg

SEQ ID NO: 4273 - DNA, 51 bp, Artificial Sequence
  Synthetic polynucleotide
acttgctgagtgtgtttctcaaacartttaatttcaggagcctacaagaaa

SEQ ID NO: 4274 - DNA, 51 bp, Artificial Sequence
  Synthetic polynucleotide
gcaaagcatggattcaaacttaggtrttggaaccaggtttttgtgtttgcc

SEQ ID NO: 4275 - DNA, 51 bp, Artificial Sequence
  Synthetic polynucleotide
tgatgggttgtgtttggtttctttcvgcatgattttgaagtcagaggagat

SEQ ID NO: 4276 - DNA, 51 bp, Artificial Sequence
  Synthetic polynucleotide
gtgcagccagatgcctggacagaggrcaatggcttccatggtaaggtgcct

SEQ ID NO: 4277 - DNA, 51 bp, Artificial Sequence
  Synthetic polynucleotide
tatgctatacatgatgaaacatcttrtaaaggaaaaaaaataccgaaagac

SEQ ID NO: 4278 - DNA, 51 bp, Artificial Sequence
  Synthetic polynucleotide
acaattttcccctttttttacccccrgtggtatgtgggagtttgtttcata

SEQ ID NO: 4279 - DNA, 51 bp, Artificial Sequence
  Synthetic polynucleotide
  misc_feature (26)..(26): n is a, c, g, t or u
aaagtggccattattgaacttacagntgggtggtatgctgttaaggcccag

SEQ ID NO: 4280 - DNA, 51 bp, Artificial Sequence
  Synthetic polynucleotide
gaattaataatccttttgttttcttdgaaaacacaacaaaaccatatttac

SEQ ID NO: 4281 - DNA, 51 bp, Artificial Sequence
  Synthetic polynucleotide
aataatggaacccttgttgaccgctrccgtaaacacaacctctactttgag

SEQ ID NO: 4282 - DNA, 51 bp, Artificial Sequence
  Synthetic polynucleotide
acccctctggagtccttttggtaccrtgacatggaaaatcccaaaagtcac

SEQ ID NO: 4283 - DNA, 51 bp, Artificial Sequence
  Synthetic polynucleotide
atcatgaagaagctcttgaccaagtrtgacaacctctttgagacgtccttt

SEQ ID NO: 4284 - DNA, 51 bp, Artificial Sequence
  Synthetic polynucleotide
tgttacgtggttgccctgggagcccrcaccggggaggagagcgtggctgac

SEQ ID NO: 4285 - DNA, 51 bp, Artificial Sequence
  Synthetic polynucleotide
caccaccaaagtggatgcactgaagragatgttgttggatcaggtgagcag

SEQ ID NO: 4286 - DNA, 51 bp, Artificial Sequence
  Synthetic polynucleotide
gttgctgccccctttgatgatgatgrcaagatcgttgggggctacaactgt

SEQ ID NO: 4287 - DNA, 51 bp, Artificial Sequence
  Synthetic polynucleotide
gactaaccctgcagtgctttccctcrgtgcatccaccgggacgtggcagcg

SEQ ID NO: 4288 - DNA, 51 bp, Artificial Sequence
  Synthetic polynucleotide
gaaaacgtttctttttctttgttctrggtggttctggaatggagccgagat

SEQ ID NO: 4289 - DNA, 51 bp, Artificial Sequence
  Synthetic polynucleotide
aaatattatatatcacatattttcarcagggcctcagggtgtggaagggcc

SEQ ID NO: 4290 - DNA, 51 bp, Artificial Sequence
  Synthetic polynucleotide
  misc_feature (26)..(26): n is a, c, g, t or u
tgggaatgctttatggcttaatgaangagagtgctcaattcagagaagaaa

SEQ ID NO: 4291 - DNA, 51 bp, Artificial Sequence
  Synthetic polynucleotide
tctcttcttgaaacagtggagcatcrtacagagtttacttgtggtttagac

SEQ ID NO: 4292 - DNA, 51 bp, Artificial Sequence
  Synthetic polynucleotide
acaacgtccttggagaaaacatgcaratattccattgtaaacaaatcaaag

SEQ ID NO: 4293 - DNA, 51 bp, Artificial Sequence
  Synthetic polynucleotide
tcaaaggaaaaatacatttaagattvtaagtctggttataagcttaaaaag

SEQ ID NO: 4294 - DNA, 51 bp, Artificial Sequence
  Synthetic polynucleotide
gcggcagagcgccagcgagcgggagraactgcgcatgcgcacgctggcccg

SEQ ID NO: 4295 - DNA, 51 bp, Artificial Sequence
  Synthetic polynucleotide
taggggaggccataaggagcgccccrcagtcatgctgtttccctttaggaa

SEQ ID NO: 4296 - DNA, 51 bp, Artificial Sequence
  Synthetic polynucleotide
ccccacagtcatgctgtttccctttrggaatctcggctcaccaacccaggt

SEQ ID NO: 4297 - DNA, 51 bp, Artificial Sequence
  Synthetic polynucleotide
acaacacgctgaagaatttcttatcraacctgaatccaaagttgctaagtt

SEQ ID NO: 4298 - DNA, 51 bp, Artificial Sequence
  Synthetic polynucleotide
agaatttcttatcaaacctgaatccraagttgctaagttggacacgtctca

SEQ ID NO: 4299 - DNA, 51 bp, Artificial Sequence
  Synthetic polynucleotide
gaattttgataagctgaatgtaaggrcaacacactatacacctcttgcatg

SEQ ID NO: 4300 - DNA, 51 bp, Artificial Sequence
  Synthetic polynucleotide
gtaaatgccatctgctatggggccargattatgcttccaggtgttcttcga

SEQ ID NO: 4301 - DNA, 51 bp, Artificial Sequence
  Synthetic polynucleotide
gcatgtcgtcttcccacttgcaataytgccctcgacacagatctggcaaaa

SEQ ID NO: 4302 - DNA, 51 bp, Artificial Sequence
  Synthetic polynucleotide
aaccaacaacccactcaccagaggaytgtggccacggacatttctccactt

SEQ ID NO: 4303 - DNA, 51 bp, Artificial Sequence
  Synthetic polynucleotide
agtttaccttcggaccaatcctgagrcttgttaccagaggttaaagaagag

SEQ ID NO: 4304 - DNA, 51 bp, Artificial Sequence
  Synthetic polynucleotide
tttattttctctttggttttatcgtrggtttatttgacatggcctgtgcca

SEQ ID NO: 4305 - DNA, 51 bp, Artificial Sequence
  Synthetic polynucleotide
ttcacatcgcggaaagtccctgctcrcatgcctcacatgattgaccggatt

SEQ ID NO: 4306 - DNA, 51 bp, Artificial Sequence
  Synthetic polynucleotide
aggaagtttgtttgcctgaatgacarcattgaccacaatcataaagatgct

SEQ ID NO: 4307 - DNA, 51 bp, Artificial Sequence
  Synthetic polynucleotide
agcaaaaatactgggaggcaactaaragatacatttgcagattccctcaga

SEQ ID NO: 4308 - DNA, 51 bp, Artificial Sequence
  Synthetic polynucleotide
tccacgctgctctgcagcctgtgctrcggcgacatggagaacaagctgttt

SEQ ID NO: 4309 - DNA, 51 bp, Artificial Sequence
  Synthetic polynucleotide
tagagaaactggagcagctcattttrgaagggtaagaaagagctcattaaa

SEQ ID NO: 4310 - DNA, 51 bp, Artificial Sequence
  Synthetic polynucleotide
tttggctgacctgcctagaaatattrtgttgaataatgatgagttggaatt

SEQ ID NO: 4311 - DNA, 51 bp, Artificial Sequence
  Synthetic polynucleotide
ttcaaagcaaattgacaaatcctctrtgtacaagtttttagaaccatggct

SEQ ID NO: 4312 - DNA, 51 bp, Artificial Sequence
  Synthetic polynucleotide
cttatgtttaaagaaggatgggaacrcaaaaagagccttcagatcctacat

SEQ ID NO: 4313 - DNA, 51 bp, Artificial Sequence
  Synthetic polynucleotide
ggtgggcctgggaggggtggtggccdttttttgtctaaccctaactgagaa

SEQ ID NO: 4314 - DNA, 51 bp, Artificial Sequence
  Synthetic polynucleotide
gaggggtggtggccattttttgtctraccctaactgagaagggcgtaggcg

SEQ ID NO: 4315 - DNA, 51 bp, Artificial Sequence
  Synthetic polynucleotide
catgtgtttcctctttgaaacagagratgctctcatcactcagtcaaggct

SEQ ID NO: 4316 - DNA, 51 bp, Artificial Sequence
  Synthetic polynucleotide
gccgttagcctgatcatcttcacctrctacaccgcctgggtgattctcttg

SEQ ID NO: 4317 - DNA, 51 bp, Artificial Sequence
  Synthetic polynucleotide
ggagagacatcgtcagctacgtcatrgaccacttcgacattgagatcatgg

SEQ ID NO: 4318 - DNA, 51 bp, Artificial Sequence
  Synthetic polynucleotide
ttatgttctatttcagtgtcatcctrgtggctgtttgatagacctctgcct

SEQ ID NO: 4319 - DNA, 51 bp, Artificial Sequence
  Synthetic polynucleotide
cctttttacatagaaaaggttcatgragaaattgaaagagtcattggcgcc

SEQ ID NO: 4320 - DNA, 51 bp, Artificial Sequence
  Synthetic polynucleotide
ggtgtgctctttgtgaaattccaccrtggcgtaccgtggccagggtcagaa

SEQ ID NO: 4321 - DNA, 51 bp, Artificial Sequence
  Synthetic polynucleotide
acctgtgttgtggtttacactggatrtggaaatagagaggagcaaaatctg

SEQ ID NO: 4322 - DNA, 51 bp, Artificial Sequence
  Synthetic polynucleotide
catgcagagaaccatgcgcacacgcragcgcagaaagatgtatgagatgtg

SEQ ID NO: 4323 - DNA, 51 bp, Artificial Sequence
  Synthetic polynucleotide
tgttcagtgtcaatgtatcttggcaytggaaatctggagtgaagaatttcc

SEQ ID NO: 4324 - DNA, 51 bp, Artificial Sequence
  Synthetic polynucleotide
accctccacggctgcgtcactcgggyaataataggtgatgatctccgtcac

SEQ ID NO: 4325 - DNA, 51 bp, Artificial Sequence
  Synthetic polynucleotide
gtgactgtcaggacccttctgagcayggcagtgatggttgctctgggcagc

SEQ ID NO: 4326 - DNA, 51 bp, Artificial Sequence
  Synthetic polynucleotide
cactatcactgccctgctccacaatratcggaaactcctggaaaaacacat

SEQ ID NO: 4327 - DNA, 51 bp, Artificial Sequence
  Synthetic polynucleotide
ataaactaatacaccagtcttgtaarccggagatgaaaacctttttccaag

SEQ ID NO: 4328 - DNA, 51 bp, Artificial Sequence
  Synthetic polynucleotide
tttttttacttttctagatttgaaarttgtggaatttttattgttatgttg

SEQ ID NO: 4329 - DNA, 51 bp, Artificial Sequence
  Synthetic polynucleotide
ccggtcggagtaaacacagaatgctrtcgaatctatgaggcttgctcctat

SEQ ID NO: 4330 - DNA, 51 bp, Artificial Sequence
  Synthetic polynucleotide
actgatttttttctcctccccccacrggagatccaccacctgcatcacctg

SEQ ID NO: 4331 - DNA, 51 bp, Artificial Sequence
  Synthetic polynucleotide
ggatttgtttgcttttttcctgtacrggaaactggatgccttcatctatga

SEQ ID NO: 4332 - DNA, 51 bp, Artificial Sequence
  Synthetic polynucleotide
attctctacgtggatttggatctgcrccatggagatggtaagccctttggt

SEQ ID NO: 4333 - DNA, 51 bp, Artificial Sequence
  Synthetic polynucleotide
acactatcctctgagatcccagatcrtgaggtaagtaaggctctgacaagt

SEQ ID NO: 4334 - DNA, 51 bp, Artificial Sequence
  Synthetic polynucleotide
gcagacctgcgcaagctggcggtgarcatggtgcccttccctcgcctgcac

SEQ ID NO: 4335 - DNA, 51 bp, Artificial Sequence
  Synthetic polynucleotide
attgctgaatgttcacaggatggcartggttatatcagtgcagcagaacta

SEQ ID NO: 4336 - DNA, 51 bp, Artificial Sequence
  Synthetic polynucleotide
gccccacccacccccctgcagtgtcrtgcggttcctggtgtccaagcggaa

SEQ ID NO: 4337 - DNA, 51 bp, Artificial Sequence
  Synthetic polynucleotide
tgtattcttttttcgttttcctgtargttcgaagcattcagcaaacaatgg

SEQ ID NO: 4338 - DNA, 51 bp, Artificial Sequence
  Synthetic polynucleotide
tgaacaatcatcagctggaactggcraagcagctacacaaagagggtcatc

SEQ ID NO: 4339 - DNA, 51 bp, Artificial Sequence
  Synthetic polynucleotide
ccccatcaggtatgacaatcggtgcrggaacatgagccaggagcaggtggc

SEQ ID NO: 4340 - DNA, 51 bp, Artificial Sequence
  Synthetic polynucleotide
tgccttgtacaactacatctttgctragaagtaccaggggagcttcatcct

SEQ ID NO: 4341 - DNA, 51 bp, Artificial Sequence
  Synthetic polynucleotide
acccttcatggatcagcattatttcraagaggacaaacacaggtaatttat

SEQ ID NO: 4342 - DNA, 51 bp, Artificial Sequence
  Synthetic polynucleotide
cctttcaccataagagttacatctgragtcctagagtcaaatggtatggta

SEQ ID NO: 4343 - DNA, 51 bp, Artificial Sequence
  Synthetic polynucleotide
attttttttttaacagatttggttcrtttgacttgcacatcttctaaaaca

SEQ ID NO: 4344 - DNA, 51 bp, Artificial Sequence
  Synthetic polynucleotide
ttgtgttttgtgatggaatatgttartgggggcgaggtgagtcaagaagta

SEQ ID NO: 4345 - DNA, 51 bp, Artificial Sequence
  Synthetic polynucleotide
cccagcaggaagaagggggacaactrttacctgaatcggactcacatgctg

SEQ ID NO: 4346 - DNA, 51 bp, Artificial Sequence
  Synthetic polynucleotide
caagtgccgggaatcatttcacgggrgtccgctgggcggccagcagtgcta

SEQ ID NO: 4347 - DNA, 51 bp, Artificial Sequence
  Synthetic polynucleotide
cctcatcgtctccttttcatcctctrggtcctctggacacagacatgcagc

SEQ ID NO: 4348 - DNA, 51 bp, Artificial Sequence
  Synthetic polynucleotide
gaccgcaatgtggccaccccacgagrctactactttgctctggcccatacc

SEQ ID NO: 4349 - DNA, 51 bp, Artificial Sequence
  Synthetic polynucleotide
ttacttagtatttgcttttcaggacrtgtgaatttctctgatgaggtcaca

SEQ ID NO: 4350 - DNA, 51 bp, Artificial Sequence
  Synthetic polynucleotide
gctgttcaacatgaaaccttaaactrtataggtctgctggactgtgtggct

SEQ ID NO: 4351 - DNA, 51 bp, Artificial Sequence
  Synthetic polynucleotide
aagaaagacgtttttgatttttttcrgacttctctggctccactaccctgc

SEQ ID NO: 4352 - DNA, 51 bp, Artificial Sequence
  Synthetic polynucleotide
tggagcatcctgtgaagatatagctrgagtctgtcatgcacatccggtaat

SEQ ID NO: 4353 - DNA, 51 bp, Artificial Sequence
  Synthetic polynucleotide
  misc_feature (26)..(26): n is a, c, g, t or u
actaacattaagaacaaacaaacccntatttttagtttcccaagtctatct

SEQ ID NO: 4354 - DNA, 51 bp, Artificial Sequence
  Synthetic polynucleotide
agagatgagagaccactctttccccragtaagtaaaagcttcatgctatcc

SEQ ID NO: 4355 - DNA, 51 bp, Artificial Sequence
  Synthetic polynucleotide
gtaggcaagagtgccttgacgatacdgctaattcagaatcattttgtggac

SEQ ID NO: 4356 - DNA, 51 bp, Artificial Sequence
  Synthetic polynucleotide
actttttatgtatttcagggtgttgdtgatgccttctatacattagttcga

SEQ ID NO: 4357 - DNA, 51 bp, Artificial Sequence
  Synthetic polynucleotide
tagtaaaagtaaccctggagacttcrcactttccgttaggtaagttggaat

SEQ ID NO: 4358 - DNA, 51 bp, Artificial Sequence
  Synthetic polynucleotide
  misc_feature (26)..(26): n is a, c, g, t or u
agctgtcacccacatcaagattcagnacactggtgattactatgacctgta

SEQ ID NO: 4359 - DNA, 51 bp, Artificial Sequence
  Synthetic polynucleotide
tttctttctttccagacactacaacracaggagtgcaaacttctctacagc

SEQ ID NO: 4360 - DNA, 51 bp, Artificial Sequence
  Synthetic polynucleotide
caaaaacaaaaatagatataaaaacrtcctgccctgtaagtatcaatattc

SEQ ID NO: 4361 - DNA, 51 bp, Artificial Sequence
  Synthetic polynucleotide
gatggtgcggtctcagaggtcagggrtggtccagacagaagcacagtaccg

SEQ ID NO: 4362 - DNA, 51 bp, Artificial Sequence
  Synthetic polynucleotide
acttgtggctacaaatttcatgagcrctgtagcaccaaagtacctactatg

SEQ ID NO: 4363 - DNA, 51 bp, Artificial Sequence
  Synthetic polynucleotide
aattgtgacccagtggtgcgagggcrgcagcctctacaaacacctgcatgt

SEQ ID NO: 4364 - DNA, 51 bp, Artificial Sequence
  Synthetic polynucleotide
tattaaagtggcaatgtgtgctgacraggtaggaaactgagcttttctatt

SEQ ID NO: 4365 - DNA, 51 bp, Artificial Sequence
  Synthetic polynucleotide
gcggctggaagcctttctcacccagraagccaaggtcggcgaactcaaaga

SEQ ID NO: 4366 - DNA, 51 bp, Artificial Sequence
  Synthetic polynucleotide
ggagaatgaaggaaggctggtgcacrtcattggcgccttacggacatccaa

SEQ ID NO: 4367 - DNA, 51 bp, Artificial Sequence
  Synthetic polynucleotide
ctgatggctgcagccatgacaagcargtgggtggcagatgctcttgggcgg

SEQ ID NO: 4368 - DNA, 51 bp, Artificial Sequence
  Synthetic polynucleotide
ccttctttcttctaggtcagctactrttttcccctcaaaacattgtggcgt

SEQ ID NO: 4369 - DNA, 51 bp, Artificial Sequence
  Synthetic polynucleotide
ggcgtggacttcgagggcacgttccrtgtgaacacggtcacggatgacgac

SEQ ID NO: 4370 - DNA, 51 bp, Artificial Sequence
  Synthetic polynucleotide
aatggcacgttcacttgtgacgtcaraaaccctccagacatagtgggcaag

SEQ ID NO: 4371 - DNA, 51 bp, Artificial Sequence
  Synthetic polynucleotide
aaggatggctccattgtcatacacarcctagactacagtgacaatggcacg

SEQ ID NO: 4372 - DNA, 51 bp, Artificial Sequence
  Synthetic polynucleotide
gcagatcacttacaaagatgtggctdtgaatattcactttctgttttcttt

SEQ ID NO: 4373 - DNA, 51 bp, Artificial Sequence
  Synthetic polynucleotide
tattcactttctgttttctttccagraagtggtttggcaaaagaaaaggta

SEQ ID NO: 4374 - DNA, 51 bp, Artificial Sequence
  Synthetic polynucleotide
taaaagtgaaatattttcttttaacrggtttcaggatctgataaagaaaat

SEQ ID NO: 4375 - DNA, 51 bp, Artificial Sequence
  Synthetic polynucleotide
gctgctgctcaactactgccagtgcdagctggtggtcgaggagtactacga

SEQ ID NO: 4376 - DNA, 51 bp, Artificial Sequence
  Synthetic polynucleotide
gagaaggcgcagctccaggacctcartgaccgcttcgccagcttcatcgag

SEQ ID NO: 4377 - DNA, 51 bp, Artificial Sequence
  Synthetic polynucleotide
atatctcaagtctttgatgaagttgrtacagatcaatctggtgtcttgtct

SEQ ID NO: 4378 - DNA, 51 bp, Artificial Sequence
  Synthetic polynucleotide
taaagctaacttttatttttcctatrgagaatggactctctctgattttgt

SEQ ID NO: 4379 - DNA, 51 bp, Artificial Sequence
  Synthetic polynucleotide
acaagaatccatccttctccccaggrtaagtccagaaggcaagtgtgagag

SEQ ID NO: 4380 - DNA, 51 bp, Artificial Sequence
  Synthetic polynucleotide
gaatgaaattttagataagctggccrggtattataactgttgaactaatac

SEQ ID NO: 4381 - DNA, 51 bp, Artificial Sequence
  Synthetic polynucleotide
cagtgaggagtatgggctggtggtargtagccccctcaaccccagtctcca

SEQ ID NO: 4382 - DNA, 51 bp, Artificial Sequence
  Synthetic polynucleotide
attttgcaaactcgtaatttctttcrggaggaggcaaaacagattcagaat

SEQ ID NO: 4383 - DNA, 51 bp, Artificial Sequence
  Synthetic polynucleotide
ccagttcagctacctggaaccaggtrtggcctgcaccagccgcccatcatg

SEQ ID NO: 4384 - DNA, 51 bp, Artificial Sequence
  Synthetic polynucleotide
gacgatgatgccaatggtgatgtggrtgtggaagaaagtgatgaggtgagc

SEQ ID NO: 4385 - DNA, 51 bp, Artificial Sequence
  Synthetic polynucleotide
ccaacagtgaaacacagcaccttccrtggtgaggataagctcatcagcgtg

SEQ ID NO: 4386 - DNA, 51 bp, Artificial Sequence
  Synthetic polynucleotide
ggctaagagctgttcctgctccaccygagaggcacagggttgagtgtcata

SEQ ID NO: 4387 - DNA, 51 bp, Artificial Sequence
  Synthetic polynucleotide
ggcggagccgggccagagacggatgyctgacgggtagcctgtggggggccc

SEQ ID NO: 4388 - DNA, 51 bp, Artificial Sequence
  Synthetic polynucleotide
tatttgggatagctatacaacaaatraggtagaatttcttcataattcttt

SEQ ID NO: 4389 - DNA, 51 bp, Artificial Sequence
  Synthetic polynucleotide
ctgaacctagagcttcagacgccctrtggcgtccgcctcgacccaaccggc

SEQ ID NO: 4390 - DNA, 51 bp, Artificial Sequence
  Synthetic polynucleotide
gggagatgaagtcaactggtatctgrtgggaatgggcaatgaaatagactt

SEQ ID NO: 4391 - DNA, 51 bp, Artificial Sequence
  Synthetic polynucleotide
aatattaacaacataattattttatrgctagacagataagtttacagcagc

SEQ ID NO: 4392 - DNA, 51 bp, Artificial Sequence
  Synthetic polynucleotide
tttcaaaagggcttgaatgaggagtrgctttgccacatcttgatctgctca

SEQ ID NO: 4393 - DNA, 51 bp, Artificial Sequence
  Synthetic polynucleotide
ggatcttttcctgtaggtggctcgtragttggtgatcattgaaggagactt

SEQ ID NO: 4394 - DNA, 51 bp, Artificial Sequence
  Synthetic polynucleotide
agagacccgtgctgagtttgctgagrgatcggtagccaagctggaaaagac

SEQ ID NO: 4395 - DNA, 51 bp, Artificial Sequence
  Synthetic polynucleotide
gcattaaacacttttttccccctgcrgtgactcagcggtgttttttgaaca

SEQ ID NO: 4396 - DNA, 51 bp, Artificial Sequence
  Synthetic polynucleotide
cctgttttgcagaaagggggccctgrggcagaaggtggtccacgaagtcaa

SEQ ID NO: 4397 - DNA, 51 bp, Artificial Sequence
  Synthetic polynucleotide
gtgttttgttttgttgtgtttttctrgaggatttcaacaagctgtgctctg

SEQ ID NO: 4398 - DNA, 51 bp, Artificial Sequence
  Synthetic polynucleotide
acccggatttgccacaaaagaaattrcaaatggaaagcctttcttcaaagg

SEQ ID NO: 4399 - DNA, 51 bp, Artificial Sequence
  Synthetic polynucleotide
ggcctgtaatcctgcctgcttcatcrcacagctcctccctgtgaaaaggaa

SEQ ID NO: 4400 - DNA, 51 bp, Artificial Sequence
  Synthetic polynucleotide
acttcaacggccccttctgttctacrgcaagtaagttcccctctggatggc

SEQ ID NO: 4401 - DNA, 51 bp, Artificial Sequence
  Synthetic polynucleotide
gtcagcctcgtcggcaggtgtgacgycgtcaatggtcagtttgtggaccct

SEQ ID NO: 4402 - DNA, 51 bp, Artificial Sequence
  Synthetic polynucleotide
ctctgaactacattgtgtcttctgcrgaacctcccaagatccacctggact

SEQ ID NO: 4403 - DNA, 51 bp, Artificial Sequence
  Synthetic polynucleotide
gggccgcaggtgcgtctggcacgtcbggatggggtgggatggacccacatc

SEQ ID NO: 4404 - DNA, 51 bp, Artificial Sequence
  Synthetic polynucleotide
gtggcttcttgctaaaagctgagacygaagggccaggtggaggctacagcg

SEQ ID NO: 4405 - DNA, 51 bp, Artificial Sequence
  Synthetic polynucleotide
ggccacagcctagactgcgggacacrgggactcgaagctggaggcaccagc

SEQ ID NO: 4406 - DNA, 51 bp, Artificial Sequence
  Synthetic polynucleotide
agcggccatccctgagggacagttcrttgatagcaggaagggggcagagaa

SEQ ID NO: 4407 - DNA, 51 bp, Artificial Sequence
  Synthetic polynucleotide
ctcccctctgttcctcaccttcaggdacaagacaacctggcagatgctgag

SEQ ID NO: 4408 - DNA, 51 bp, Artificial Sequence
  Synthetic polynucleotide
ccttaccccatccctgtgcccctgcrgctttgagcagctctgcatcaactt

SEQ ID NO: 4409 - DNA, 51 bp, Artificial Sequence
  Synthetic polynucleotide
gtgccagggaaggatcccatggccgrttccatcttccactattaccaggtg

SEQ ID NO: 4410 - DNA, 51 bp, Artificial Sequence
  Synthetic polynucleotide
ctctctatgccctttctgctcccccrggatatcctcaccactcatcccttc

SEQ ID NO: 4411 - DNA, 51 bp, Artificial Sequence
  Synthetic polynucleotide
ccctcctcgctgtcctctggctcgcrggtcatggcagcgccaggcggcagg

SEQ ID NO: 4412 - DNA, 51 bp, Artificial Sequence
  Synthetic polynucleotide
attacaccatcgatgggaaccaggtdtgggtgcccttttgctgaactggtt

SEQ ID NO: 4413 - DNA, 51 bp, Artificial Sequence
  Synthetic polynucleotide
gatttggtttttgcccttccagtgtrtactctgaaagagcgatgcctccag

SEQ ID NO: 4414 - DNA, 51 bp, Artificial Sequence
  Synthetic polynucleotide
aaatattatttttttaaatgaatccrggagctgtgcggtcttatgcattgg

SEQ ID NO: 4415 - DNA, 51 bp, Artificial Sequence
  Synthetic polynucleotide
cagagcaaaccgcccagagtagaagrtggattggggcacgctgcagacgat

SEQ ID NO: 4416 - DNA, 51 bp, Artificial Sequence
  Synthetic polynucleotide
gtgtctggaatttgcatcctgctgartgtcactgaattgtgttatttgcta

SEQ ID NO: 4417 - DNA, 51 bp, Artificial Sequence
  Synthetic polynucleotide
  misc_feature (26)..(26): n is a, c, g, t or u
ttggatattctcgacacagcaggtcnagaggagtacagtgcaatgagggac

SEQ ID NO: 4418 - DNA, 51 bp, Artificial Sequence
  Synthetic polynucleotide
gatcctctctctgaaatcactgagcrggagaaagattttctatggagtcac

SEQ ID NO: 4419 - DNA, 51 bp, Artificial Sequence
  Synthetic polynucleotide
tgatgacattgcatacattcgaaagrccctagccttagataaaactgagca

SEQ ID NO: 4420 - DNA, 51 bp, Artificial Sequence
  Synthetic polynucleotide
ttcttcatgatttaatttttttcccrgatcaggtttcattgttgctgaaat

SEQ ID NO: 4421 - DNA, 51 bp, Artificial Sequence
  Synthetic polynucleotide
ttatttgtttgtttgttttgtcactrgcacggggattctaaccttagggaa

SEQ ID NO: 4422 - DNA, 51 bp, Artificial Sequence
  Synthetic polynucleotide
atcttcaaccaaggcatgatctggtrggccagctgttggacagcttatcac

SEQ ID NO: 4423 - DNA, 51 bp, Artificial Sequence
  Synthetic polynucleotide
caacttaacctgttaattttcttacrgggaacaagccatcaagcccacctg

SEQ ID NO: 4424 - DNA, 51 bp, Artificial Sequence
  Synthetic polynucleotide
cccgtcactgaagatgttgtatgtcyacagaaggacagaagcaaaagggat

SEQ ID NO: 4425 - DNA, 51 bp, Artificial Sequence
  Synthetic polynucleotide
ataatgcataacctttccctgatgcrggaaggaactgtgagctgtgcaagg

SEQ ID NO: 4426 - DNA, 51 bp, Artificial Sequence
  Synthetic polynucleotide
gatgttcctgcttgtcttttgctttrgatatgagcttctgagacgtaaaat

SEQ ID NO: 4427 - DNA, 51 bp, Artificial Sequence
  Synthetic polynucleotide
ggcctcacgcacttcctgatgaacgrggtcatcaagctgcagcagcagatg

SEQ ID NO: 4428 - DNA, 51 bp, Artificial Sequence
  Synthetic polynucleotide
caccgctgtcccctctgctggtgacrgcacgcagtggaagcactctggaag

SEQ ID NO: 4429 - DNA, 51 bp, Artificial Sequence
  Synthetic polynucleotide
tcattggcctcccttgtgcctgtgcrggaggagctgattaactcagtggtc

SEQ ID NO: 4430 - DNA, 51 bp, Artificial Sequence
  Synthetic polynucleotide
ccctgaccaccctctccattaccgcdgctctggccaggctgccgcacctct

SEQ ID NO: 4431 - DNA, 51 bp, Artificial Sequence
  Synthetic polynucleotide
tttgttctcactgttttctttctttrggtgaaagtcttcgaccagcgatga

SEQ ID NO: 4432 - DNA, 51 bp, Artificial Sequence
  Synthetic polynucleotide
caacaacgaggcaggccgtacggtgrgctttgagaggctccgcaccctaag

SEQ ID NO: 4433 - DNA, 51 bp, Artificial Sequence
  Synthetic polynucleotide
aagcttgaatgtgtcaaaaccaaacrccctcagctccacattgagagcaaa

SEQ ID NO: 4434 - DNA, 51 bp, Artificial Sequence
  Synthetic polynucleotide
agcatgtattacccacgggtacaacrttaccgagagctgcttgactccttg

SEQ ID NO: 4435 - DNA, 51 bp, Artificial Sequence
  Synthetic polynucleotide
catggggatttcgtggctccagagcractgtggccctatggagaggacgtg

SEQ ID NO: 4436 - DNA, 51 bp, Artificial Sequence
  Synthetic polynucleotide
cgtcggtacttccgctctggagttgrgattatccgaatggcatccatttac

SEQ ID NO: 4437 - DNA, 51 bp, Artificial Sequence
  Synthetic polynucleotide
actaccatccgagtctgttgcactaytggggtctcggtcaaggtcagactc

SEQ ID NO: 4438 - DNA, 51 bp, Artificial Sequence
  Synthetic polynucleotide
taccaaggccagctgcccttccccarccacgccgagaagcagaagcagttc

SEQ ID NO: 4439 - DNA, 51 bp, Artificial Sequence
  Synthetic polynucleotide
gggctcatgtgccaagccccagaaarggttcgtgggatggctattaaggat

SEQ ID NO: 4440 - DNA, 51 bp, Artificial Sequence
  Synthetic polynucleotide
tttttatttttcctgagtagaccatrtccttaaatgtaaaaggccctggac

SEQ ID NO: 4441 - DNA, 51 bp, Artificial Sequence
  Synthetic polynucleotide
ccggcggtcccacccgagctggacargcacttcttgctgtgcgaggcctgt

SEQ ID NO: 4442 - DNA, 51 bp, Artificial Sequence
  Synthetic polynucleotide
aaggccatgccctccagcaccttcaycaggaaatcgtcctctaccagccca

SEQ ID NO: 4443 - DNA, 51 bp, Artificial Sequence
  Synthetic polynucleotide
tacatgtaattgtggaacacaggcgycctcttgctcagccggtccacatac

SEQ ID NO: 4444 - DNA, 51 bp, Artificial Sequence
  Synthetic polynucleotide
gttccatccccaaaaggaggctgaaratcagcacaataagatcctatatcg

SEQ ID NO: 4445 - DNA, 51 bp, Artificial Sequence
  Synthetic polynucleotide
aaaataaactattttctttcctcccvgggtcgtcagacaccaaaacatatt

SEQ ID NO: 4446 - DNA, 51 bp, Artificial Sequence
  Synthetic polynucleotide
atgtaatataaaataattgtttcctrggcacaataaaagatcgaagattgt

SEQ ID NO: 4447 - DNA, 51 bp, Artificial Sequence
  Synthetic polynucleotide
aacttatatattttctccccattgcdgcacaactaaggaacgtcaagagat

SEQ ID NO: 4448 - DNA, 51 bp, Artificial Sequence
  Synthetic polynucleotide
gataatattctacttttatttgttcrgggctctgtgtgacactccaggtgt

SEQ ID NO: 4449 - DNA, 51 bp, Artificial Sequence
  Synthetic polynucleotide
agcagacccagcttaccttgaggtgrgagagtaagaggacatataatgagg

SEQ ID NO: 4450 - DNA, 51 bp, Artificial Sequence
  Synthetic polynucleotide
gttgaatttttgttttgttttctgtrggtttcagatgaaattttatttcag

SEQ ID NO: 4451 - DNA, 51 bp, Artificial Sequence
  Synthetic polynucleotide
taggctacgttttcatttttttatcrgatgtcttctcctaattgtgagata

SEQ ID NO: 4452 - DNA, 51 bp, Artificial Sequence
  Synthetic polynucleotide
aaggtgcagcagaagcagaggcagargcacttcaaccggcagatcccggcg

SEQ ID NO: 4453 - DNA, 51 bp, Artificial Sequence
  Synthetic polynucleotide
tcgacgcatgcagtactttgtggccvagaagaaattccaggtaagccctgt

SEQ ID NO: 4454 - DNA, 51 bp, Artificial Sequence
  Synthetic polynucleotide
cgcacccacgtccagggccgcgtctrcaacttcctcgagcgtcccaccggc

SEQ ID NO: 4455 - DNA, 51 bp, Artificial Sequence
  Synthetic polynucleotide
ctcctgggctccgtggtcttcatccvccgccaggtgggtggcccgggttag

SEQ ID NO: 4456 - DNA, 51 bp, Artificial Sequence
  Synthetic polynucleotide
  misc_feature (26)..(26): n is a, c, g, t or u
caggtcacagtcaccaccatcggctntggggacaaggtgccccagacgtgg

SEQ ID NO: 4457 - DNA, 51 bp, Artificial Sequence
  Synthetic polynucleotide
cctaataatgatgggttttatttccrgacttcacttctaatggtgattatg

SEQ ID NO: 4458 - DNA, 51 bp, Artificial Sequence
  Synthetic polynucleotide
acagaaaaagaaatatttgaaaggtvtgttctttgaataccttacttataa

SEQ ID NO: 4459 - DNA, 51 bp, Artificial Sequence
  Synthetic polynucleotide
cagggaccccagcgcccgagagaccrtgcagaggtcgcctctggaaaaggc

SEQ ID NO: 4460 - DNA, 51 bp, Artificial Sequence
  Synthetic polynucleotide
accaacatgttttctttgatcttacdgttgttattaattgtgattggagct

SEQ ID NO: 4461 - DNA, 51 bp, Artificial Sequence
  Synthetic polynucleotide
  misc_feature (26)..(26): n is a, c, g, t or u
acaacctgaacaaatttgatgaagtntgtacctattgatttaatcttttag

SEQ ID NO: 4462 - DNA, 51 bp, Artificial Sequence
  Synthetic polynucleotide
gaacctgtctccacaaagtgtgaccrcatattttgcaagtaagtttgaatg

SEQ ID NO: 4463 - DNA, 51 bp, Artificial Sequence
  Synthetic polynucleotide
ttaaagttcattggaacagaaagaartggatttatctgctcttcgcgttga

SEQ ID NO: 4464 - DNA, 51 bp, Artificial Sequence
  Synthetic polynucleotide
tgtaagaatgatataaccaaaaggtrtataatttggtaatgatgctaggtt

SEQ ID NO: 4465 - DNA, 51 bp, Artificial Sequence
  Synthetic polynucleotide
tctgaacctctgtttttgttatttavggtgaagcagcatctgggtgtgaga

SEQ ID NO: 4466 - DNA, 51 bp, Artificial Sequence
  Synthetic polynucleotide
gttttctccttccatttatctttctrggtcatccccttctaaatgcccatc

SEQ ID NO: 4467 - DNA, 51 bp, Artificial Sequence
  Synthetic polynucleotide
ataatggaatatttgatttaatttcrgatgctcgtgtacaagtttgccaga

SEQ ID NO: 4468 - DNA, 51 bp, Artificial Sequence
  Synthetic polynucleotide
aactaatctaattactgaagagactrctcatgttgttatgaaaacaggtat

SEQ ID NO: 4469 - DNA, 51 bp, Artificial Sequence
  Synthetic polynucleotide
aatgctctttccttcctggggatccdgggtgtccacccaattgtggttgtg

SEQ ID NO: 4470 - DNA, 51 bp, Artificial Sequence
  Synthetic polynucleotide
cgctaccgtgctcaaggagcagctcragctctgcctggccgccgagggctt

SEQ ID NO: 4471 - DNA, 51 bp, Artificial Sequence
  Synthetic polynucleotide
cggcagctggcggctgctgaggacgrgaagaagacgctgaactcgctgctg

SEQ ID NO: 4472 - DNA, 51 bp, Artificial Sequence
  Synthetic polynucleotide
catcgtgtgcgtcatgggcccggtgrgcgccccgcgccgggaccctcccca

SEQ ID NO: 4473 - DNA, 51 bp, Artificial Sequence
  Synthetic polynucleotide
aggagcacgctcagcaaggcatgaghtgcacaagagttgggtatcagctgt

SEQ ID NO: 4474 - DNA, 51 bp, Artificial Sequence
  Synthetic polynucleotide
aggaatcattggatgtatatgagtargtaggtttgttaaagcaaaagaagt

SEQ ID NO: 4475 - DNA, 51 bp, Artificial Sequence
  Synthetic polynucleotide
gcttcgctcactccgctctcttcccrggtgcacgtcggcgacgaggacttc

SEQ ID NO: 4476 - DNA, 51 bp, Artificial Sequence
  Synthetic polynucleotide
ttaaaatctaggtatgaatttttcartgagctttatcatcgcttcttgctc

SEQ ID NO: 4477 - DNA, 51 bp, Artificial Sequence
  Synthetic polynucleotide
cttaaaaaaaaaaaaaaaaaaaaaarccttttcaggagggcctgaggctat

SEQ ID NO: 4478 - DNA, 51 bp, Artificial Sequence
  Synthetic polynucleotide
ttccagaaaatagttcacaaccctgdtgtgattacctatgacactgaattt

SEQ ID NO: 4479 - DNA, 51 bp, Artificial Sequence
  Synthetic polynucleotide
gcatagaacaacgtttgggaaagtarcaaaaaattcttcttcgattaaagt

SEQ ID NO: 4480 - DNA, 51 bp, Artificial Sequence
  Synthetic polynucleotide
ctgagtgtgcgatggaccctgttacrgaaaccagccctgagcaaaggggtt

SEQ ID NO: 4481 - DNA, 51 bp, Artificial Sequence
  Synthetic polynucleotide
aaacacaagcaccaccttatcgagcrctcaaggcttcactcgggcgagaag

SEQ ID NO: 4482 - DNA, 51 bp, Artificial Sequence
  Synthetic polynucleotide
ccaactggacatttccgagccatacraagtttaccgaattgttcctgagga

SEQ ID NO: 4483 - DNA, 51 bp, Artificial Sequence
  Synthetic polynucleotide
caaagctgaaccagccacttggaagrcgaggttacgctgtgctttgaataa

SEQ ID NO: 4484 - DNA, 51 bp, Artificial Sequence
  Synthetic polynucleotide
tgtcccggcctgcagagcttggactrtgacaacagtgagaaccagctgttc

SEQ ID NO: 4485 - DNA, 51 bp, Artificial Sequence
  Synthetic polynucleotide
agagaaggcagtggactctctagtgragaagttaaagaagaagaagggagc

SEQ ID NO: 4486 - DNA, 51 bp, Artificial Sequence
  Synthetic polynucleotide
tggaccttcttccaggcctactactrctgcttcatcaccctcaccaccatc

SEQ ID NO: 4487 - DNA, 51 bp, Artificial Sequence
  Synthetic polynucleotide
cgccacgcccgccgcagcagcttcayggcgcccgcgccgggccggcggccc

SEQ ID NO: 4488 - DNA, 51 bp, Artificial Sequence
  Synthetic polynucleotide
cggcgctcggcggcgcggggcgcgcyggccaccagcactgccaggaaggcg

SEQ ID NO: 4489 - DNA, 51 bp, Artificial Sequence
  Synthetic polynucleotide
cgggccagaccagcgagcccaaaagragggggacattatccttggggggct

SEQ ID NO: 4490 - DNA, 51 bp, Artificial Sequence
  Synthetic polynucleotide
gggaccctgctctccctctctgaacrgggtgagcatctcgctctactcctc

SEQ ID NO: 4491 - DNA, 51 bp, Artificial Sequence
  Synthetic polynucleotide
gagatcactgaacttggtgactccayactgagctgtgccacggtccagggc

SEQ ID NO: 4492 - DNA, 51 bp, Artificial Sequence
  Synthetic polynucleotide
ggcagccgggcccgtgccagccaaarcggcggcgggcgggagccccgcaag

SEQ ID NO: 4493 - DNA, 51 bp, Artificial Sequence
  Synthetic polynucleotide
gggcagcactgggatgctccagggcygtcggaccttcgagtggggcagggg

SEQ ID NO: 4494 - DNA, 51 bp, Artificial Sequence
  Synthetic polynucleotide
gaacttggccctggtgtcttggaacrgcccacagtggtggtgggcaagggc

SEQ ID NO: 4495 - DNA, 51 bp, Artificial Sequence
  Synthetic polynucleotide
aagctctacaacccagagaacatctrcctgtcggaacatggaggaggagct

SEQ ID NO: 4496 - DNA, 51 bp, Artificial Sequence
  Synthetic polynucleotide
acctttttagggggtgatggtgggartgggacaaaaagacagctacgtggg

SEQ ID NO: 4497 - DNA, 51 bp, Artificial Sequence
  Synthetic polynucleotide
agctacaatgattttgggaattacarcaatcagtcttcaaattttggaccc

SEQ ID NO: 4498 - DNA, 51 bp, Artificial Sequence
  Synthetic polynucleotide
cttaatagttagcattgggagaacayagatcaccttgtatgatgttaaagg

SEQ ID NO: 4499 - DNA, 51 bp, Artificial Sequence
  Synthetic polynucleotide
ctaacccgctatccccttgcagctcracaacaacacaacgcagggccaggc

SEQ ID NO: 4500 - DNA, 51 bp, Artificial Sequence
  Synthetic polynucleotide
ataattcttctcaccctaacaggtcracctcgcttccccacccttactaac

SEQ ID NO: 4501 - DNA, 51 bp, Artificial Sequence
  Synthetic polynucleotide
gggaaggcttctgttcaagcgatcartgtttttcatcctgctgtaagtgac

SEQ ID NO: 4502 - DNA, 51 bp, Artificial Sequence
  Synthetic polynucleotide
  misc_feature (26)..(26): n is a, c, g, t or u
ccagcagtgggggctcgcggacgtgnagggccactggtccccaacaatgtg

SEQ ID NO: 4503 - DNA, 51 bp, Artificial Sequence
  Synthetic polynucleotide
tcctgcaccgagagagatggaataargcccttgaaccagccctgctgtgcc

SEQ ID NO: 4504 - DNA, 51 bp, Artificial Sequence
  Synthetic polynucleotide
ctgcgcgcccgggatttcgatctggrcctggcctggcgggtaagcgtgcgt

SEQ ID NO: 4505 - DNA, 51 bp, Artificial Sequence
  Synthetic polynucleotide
aaacctttacgtgtcaagaagctctrtgtactgtcagccttacttatagag

SEQ ID NO: 4506 - DNA, 51 bp, Artificial Sequence
  Synthetic polynucleotide
gtatatgacgaagattcaccttatcraaatataaaaattctacactcgaag

SEQ ID NO: 4507 - DNA, 51 bp, Artificial Sequence
  Synthetic polynucleotide
aaaatacaatacaataaagtagtaarggcccaactatggatatatttgaga

SEQ ID NO: 4508 - DNA, 51 bp, Artificial Sequence
  Synthetic polynucleotide
tgggccctgtaccacctctcaaaggrccctgagatccaggaggccttgcac

SEQ ID NO: 4509 - DNA, 51 bp, Artificial Sequence
  Synthetic polynucleotide
tcactctatgccaccttcctccccargtggactcgccccgtgctgcctttc

SEQ ID NO: 4510 - DNA, 51 bp, Artificial Sequence
  Synthetic polynucleotide
atcccaactatcgggcggctgcgcargagggcagggaaggtggtgtccgag

SEQ ID NO: 4511 - DNA, 51 bp, Artificial Sequence
  Synthetic polynucleotide
ctacctgtacaccgtggtggccttcracttcttccgcaagttctacaacaa

SEQ ID NO: 4512 - DNA, 51 bp, Artificial Sequence
  Synthetic polynucleotide
cgcgggtgacgaatacgagctctacrgggtggtcttcgacatcaccttctt

SEQ ID NO: 4513 - DNA, 51 bp, Artificial Sequence
  Synthetic polynucleotide
gccttcaacttcttccgcaagttctrcaacaagagcgaggatgaggatgaa

SEQ ID NO: 4514 - DNA, 51 bp, Artificial Sequence
  Synthetic polynucleotide
gatcgaatagaagtgacaaggctcartgggaccatgaggaagatcttgatt

SEQ ID NO: 4515 - DNA, 51 bp, Artificial Sequence
  Synthetic polynucleotide
gttataaacgaaaagttgatgaacartcatcagctggaactggcaaagcag

SEQ ID NO: 4516 - DNA, 51 bp, Artificial Sequence
  Synthetic polynucleotide
cagggtgacttttctttgcacccacrgataatagaggagttggcagatgcc

SEQ ID NO: 4517 - DNA, 51 bp, Artificial Sequence
  Synthetic polynucleotide
aattgtaccaggttacagcagctggrcatattaggtaaggttacaatatat

SEQ ID NO: 4518 - DNA, 51 bp, Artificial Sequence
  Synthetic polynucleotide
gccgactaccagcccaccgagcaggrcatcctccgaaccagggtcaaaacc

SEQ ID NO: 4519 - DNA, 51 bp, Artificial Sequence
  Synthetic polynucleotide
gacctgggttccccctctcctgcagracgattccctgatgaggcagatgcg

SEQ ID NO: 4520 - DNA, 51 bp, Artificial Sequence
  Synthetic polynucleotide
gggttctgaggtccataccaagaagrcggtgatgatcaagaccatcgagac

SEQ ID NO: 4521 - DNA, 51 bp, Artificial Sequence
  Synthetic polynucleotide
tccttaagaaagtgcatgaagaggtrtaccttggcccctcttcctggggtc

SEQ ID NO: 4522 - DNA, 51 bp, Artificial Sequence
  Synthetic polynucleotide
gccctggacatcgagatcgccacctrcaggaagctgctagagggcgaggag

SEQ ID NO: 4523 - DNA, 51 bp, Artificial Sequence
  Synthetic polynucleotide
atcgccacctacaggaagctgctagdgggcgaggagaaccggtgagccctc

SEQ ID NO: 4524 - DNA, 51 bp, Artificial Sequence
  Synthetic polynucleotide
tacaggaagctgctagagggcgaggrgaaccggtgagccctcatcacagcc

SEQ ID NO: 4525 - DNA, 51 bp, Artificial Sequence
  Synthetic polynucleotide
gagcgggcagagatgatggagctcartgaccgctttgccagctacatcgag

SEQ ID NO: 4526 - DNA, 51 bp, Artificial Sequence
  Synthetic polynucleotide
aacatgcatgaagccgaagagtggtrccgctccaaggtagccctgcctgtg

SEQ ID NO: 4527 - DNA, 51 bp, Artificial Sequence
  Synthetic polynucleotide
caacgcggagctgctccgccaggccragcacgaagccaacgactaccggcg

SEQ ID NO: 4528 - DNA, 51 bp, Artificial Sequence
  Synthetic polynucleotide
ggagcgtgaacagatcaagaccctcdacaacaagtttgcctccttcatcga

SEQ ID NO: 4529 - DNA, 51 bp, Artificial Sequence
  Synthetic polynucleotide
gagcgtgaacagatcaagaccctcavcaacaagtttgcctccttcatcgac

SEQ ID NO: 4530 - DNA, 51 bp, Artificial Sequence
  Synthetic polynucleotide
tgagaaggtgaccatgcagaacctcratgaccgcctggcctcctacctgga

SEQ ID NO: 4531 - DNA, 51 bp, Artificial Sequence
  Synthetic polynucleotide
ttttggtttctgtgtccttcctccavcccttccaggagctgcgtgagacca

SEQ ID NO: 4532 - DNA, 51 bp, Artificial Sequence
  Synthetic polynucleotide
gcggctgcgctttgcccggaagcccrtttccatcatcggtgagtcatgcct

SEQ ID NO: 4533 - DNA, 51 bp, Artificial Sequence
  Synthetic polynucleotide
catggtggtcctctgcgtgggctccraggggcaggtgtttgccacgtcggc

SEQ ID NO: 4534 - DNA, 51 bp, Artificial Sequence
  Synthetic polynucleotide
cctgtacatcggcttcctgggcctcrtcttctcctcgtactttgtgtacct

SEQ ID NO: 4535 - DNA, 51 bp, Artificial Sequence
  Synthetic polynucleotide
atctacacggctgtcttcacaccctvctcggctgccttcctgctgaaggag

SEQ ID NO: 4536 - DNA, 51 bp, Artificial Sequence
  Synthetic polynucleotide
  misc_feature (26)..(26): n is a, c, g, t or u
caccccggccgcatcgccgtccactncttcaagggctggttcctcatcgac

SEQ ID NO: 4537 - DNA, 51 bp, Artificial Sequence
  Synthetic polynucleotide
atgtgcacctttgcgctcatcgcgcvctggctagcctgcatctggtacgcc

SEQ ID NO: 4538 - DNA, 51 bp, Artificial Sequence
  Synthetic polynucleotide
ctggctagcctgcatctggtacgccvtcggcaacatggagcagccacacat

SEQ ID NO: 4539 - DNA, 51 bp, Artificial Sequence
  Synthetic polynucleotide
ctgcatctggtacgccatcggcaacvtggagcagccacacatggactcacg

SEQ ID NO: 4540 - DNA, 51 bp, Artificial Sequence
  Synthetic polynucleotide
gagctgtgcggctactcgcgggccgvggtgatgcagcgaccctgcacctgc

SEQ ID NO: 4541 - DNA, 51 bp, Artificial Sequence
  Synthetic polynucleotide
  misc_feature (26)..(26): n is a, c, g, t or u
agcctcaccagtgtgggcttcggcancgtctctcccaacaccaactcagag

SEQ ID NO: 4542 - DNA, 51 bp, Artificial Sequence
  Synthetic polynucleotide
gtgggcttcggcaacgtctctcccadcaccaactcagagaagatcttctcc

SEQ ID NO: 4543 - DNA, 51 bp, Artificial Sequence
  Synthetic polynucleotide
agagaagatcttctccatctgcgtcdtgctcattggctgtgagtgtgccca

SEQ ID NO: 4544 - DNA, 51 bp, Artificial Sequence
  Synthetic polynucleotide
gcacgcctggtcctacaccaacggcrtcgacatgaacgcggtgaggccacc

SEQ ID NO: 4545 - DNA, 51 bp, Artificial Sequence
  Synthetic polynucleotide
caaagtggaaatcgccttctaccggdaagatggtaggagcgggccggggcg

SEQ ID NO: 4546 - DNA, 51 bp, Artificial Sequence
  Synthetic polynucleotide
tcggcggccccggggcgacgtggagrgcaggctggatgccctccagcgcca

SEQ ID NO: 4547 - DNA, 51 bp, Artificial Sequence
  Synthetic polynucleotide
catactggaaggcatggtggaagccvctgccatgacgacacagtgccgtag

SEQ ID NO: 4548 - DNA, 51 bp, Artificial Sequence
  Synthetic polynucleotide
cagtacattgtagaggactggcaggraaagtacaagagccaaatcttgaat

SEQ ID NO: 4549 - DNA, 51 bp, Artificial Sequence
  Synthetic polynucleotide
aaaggatatgagtgaaccagaatctycacagccgctctccggatggggtgg

SEQ ID NO: 4550 - DNA, 51 bp, Artificial Sequence
  Synthetic polynucleotide
tgccctggtgggcgccatcccgtccrtcatgaacgtcctcctcgtctgcct

SEQ ID NO: 4551 - DNA, 51 bp, Artificial Sequence
  Synthetic polynucleotide
atcttcatgacagaggagcagaagargtactacaatgccatgaagaagctg

SEQ ID NO: 4552 - DNA, 51 bp, Artificial Sequence
  Synthetic polynucleotide
gatgtccctgcctgccctcttcaacrtcgggctgctgctcttcctcgtcat

SEQ ID NO: 4553 - DNA, 51 bp, Artificial Sequence
  Synthetic polynucleotide
ccgagtcctccgggccctgaaaactrtatcagtcatttcaggtgaaaatca

SEQ ID NO: 4554 - DNA, 51 bp, Artificial Sequence
  Synthetic polynucleotide
ttctggagggtgctgttcaaggactrcaacctggagcgctatggccggctg

SEQ ID NO: 4555 - DNA, 51 bp, Artificial Sequence
  Synthetic polynucleotide
acgcaacagcaacctgagtcagaccrgtaggtcatcccggatgctggcagt

SEQ ID NO: 4556 - DNA, 51 bp, Artificial Sequence
  Synthetic polynucleotide
gaagaaagtctgtacatgtatctttrctttgttattttcatcatctttggg

SEQ ID NO: 4557 - DNA, 51 bp, Artificial Sequence
  Synthetic polynucleotide
tgtttcctctctcgccccacggagaraaccatcttcatcatcttcatgctg

SEQ ID NO: 4558 - DNA, 51 bp, Artificial Sequence
  Synthetic polynucleotide
agctgtgtctttgtgtttgtgctgcrggtgggcaagtgggagaaccatacg

SEQ ID NO: 4559 - DNA, 51 bp, Artificial Sequence
  Synthetic polynucleotide
ggagagttttgaggcctgtggttgaratggaaatatcttcacagaaaaact

SEQ ID NO: 4560 - DNA, 51 bp, Artificial Sequence
  Synthetic polynucleotide
aatctgacagaagcactgtcgctctvtgaagaacagctggggcgcctgtat

SEQ ID NO: 4561 - DNA, 51 bp, Artificial Sequence
  Synthetic polynucleotide
caagagagtgccaaccttctgtttcrgatacctgggctatatgtgtgacct

SEQ ID NO: 4562 - DNA, 51 bp, Artificial Sequence
  Synthetic polynucleotide
gtccaggttcgctgcaaaccagaccrtggatactggagtgcatggagtcca

SEQ ID NO: 4563 - DNA, 51 bp, Artificial Sequence
  Synthetic polynucleotide
ttggcttcaagattttgtgccaaccrggtaaaatgttcttttctatttttt

SEQ ID NO: 4564 - DNA, 51 bp, Artificial Sequence
  Synthetic polynucleotide
aaagaccttttcctccctcattcacrggctggcttattagctgtaatggcc

SEQ ID NO: 4565 - DNA, 51 bp, Artificial Sequence
  Synthetic polynucleotide
aatgctatcaaagagatgattgagarctggtacggagggagtcgagccggg

SEQ ID NO: 4566 - DNA, 51 bp, Artificial Sequence
  Synthetic polynucleotide
ttttctgtttgatttgccagtttagrtgcaaaatccacaagtattcaagtg

SEQ ID NO: 4567 - DNA, 51 bp, Artificial Sequence
  Synthetic polynucleotide
  misc_feature (26)..(26): n is a, c, g, t or u
tttttggttttattttttgttttgcngttctccgggagatgttgcataacc

SEQ ID NO: 4568 - DNA, 51 bp, Artificial Sequence
  Synthetic polynucleotide
ttgaggtattgaatttctttggaccrggtgaattgggacgaagaaaaggaa

SEQ ID NO: 4569 - DNA, 51 bp, Artificial Sequence
  Synthetic polynucleotide
tttactcatctttttggtatctaacvgaaagaagatctggatattgtatgt

SEQ ID NO: 4570 - DNA, 51 bp, Artificial Sequence
  Synthetic polynucleotide
tgggaaaattttggaagttgttggcrggtacagtccaaaatctgggagtgg

SEQ ID NO: 4571 - DNA, 51 bp, Artificial Sequence
  Synthetic polynucleotide
aaaattttggaagttgttggcaggtrcagtccaaaatctgggagtgggtct

SEQ ID NO: 4572 - DNA, 51 bp, Artificial Sequence
  Synthetic polynucleotide
tcttactcttttgtttttcttttccvggtattcagtacacaatgcaggcat

SEQ ID NO: 4573 - DNA, 51 bp, Artificial Sequence
  Synthetic polynucleotide
ttgtgtcttctgctgtttgtttatcrgcaaggagagacagtagctgatgtt

SEQ ID NO: 4574 - DNA, 51 bp, Artificial Sequence
  Synthetic polynucleotide
gatttttttatataggttatcgacabaccgactaacagcatttccaaagat

SEQ ID NO: 4575 - DNA, 51 bp, Artificial Sequence
  Synthetic polynucleotide
actggttgctttctttttattgtttrgatcgtctggtagaatcaacttcct

SEQ ID NO: 4576 - DNA, 51 bp, Artificial Sequence
  Synthetic polynucleotide
aaacacacacccattcctgtacctcvggtaatgtagcaccaaactcctcaa

SEQ ID NO: 4577 - DNA, 51 bp, Artificial Sequence
  Synthetic polynucleotide
cacacccattcctgtacctcaggtartgtagcaccaaactcctcaaccaag

SEQ ID NO: 4578 - DNA, 51 bp, Artificial Sequence
  Synthetic polynucleotide
tttgtttgttttactactttcttttvggaaaacaccagaaattattgttgg

SEQ ID NO: 4579 - DNA, 51 bp, Artificial Sequence
  Synthetic polynucleotide
ctttttcttttcttcttgattatcarggcttggaccctggcaaacagatta

SEQ ID NO: 4580 - DNA, 51 bp, Artificial Sequence
  Synthetic polynucleotide
  misc_feature (26)..(26): n is a, c, g, t or u
gaagaatggtgttaaatttaccaacnggtttgcaagtcgttattatatttt

SEQ ID NO: 4581 - DNA, 51 bp, Artificial Sequence
  Synthetic polynucleotide
ccgaggcggatcgggtgttgcatccdtggagcgagctgagagctcgaggtg

SEQ ID NO: 4582 - DNA, 51 bp, Artificial Sequence
  Synthetic polynucleotide
ataaatatgttttcttttttgccttrgaatgcgttgatatcaatgttactc

SEQ ID NO: 4583 - DNA, 51 bp, Artificial Sequence
  Synthetic polynucleotide
taagggatttgctttgttttattttrgtcctgttgttctacaatgtacaca

SEQ ID NO: 4584 - DNA, 51 bp, Artificial Sequence
  Synthetic polynucleotide
cagcaggagctggcttgggagtgtgrctaccgtcgtgaggcggcttgtgcc

SEQ ID NO: 4585 - DNA, 51 bp, Artificial Sequence
  Synthetic polynucleotide
tacacgcgcagggccctggccaccgrggtcaccgccggcctgctatcgctg

SEQ ID NO: 4586 - DNA, 51 bp, Artificial Sequence
  Synthetic polynucleotide
ggcaggtgggatggagagcatgtccratgttccatatgtaatgaacagagg

SEQ ID NO: 4587 - DNA, 51 bp, Artificial Sequence
  Synthetic polynucleotide
tccacctgtgctgtctctttcctgcrgcaacacgggattcccatcccggtc

SEQ ID NO: 4588 - DNA, 51 bp, Artificial Sequence
  Synthetic polynucleotide
cccacttgctcccctcttttgcctcrgggaacgccccatgtacggccggga

SEQ ID NO: 4589 - DNA, 51 bp, Artificial Sequence
  Synthetic polynucleotide
gcataatgcatgtgggagggctcagbgccgtctgaatagaggagagcaaaa

SEQ ID NO: 4590 - DNA, 51 bp, Artificial Sequence
  Synthetic polynucleotide
ccccactgtctctcttctttctgtcrggggctcccacaggatcagaggctg

SEQ ID NO: 4591 - DNA, 51 bp, Artificial Sequence
  Synthetic polynucleotide
ctcctgggctgcttcgggctcacagrgcccaacagcggaagtgaccccagc

SEQ ID NO: 4592 - DNA, 51 bp, Artificial Sequence
  Synthetic polynucleotide
tggggagtagatctgctaaaatttgrtggttgttactgtgacagtttggaa

SEQ ID NO: 4593 - DNA, 51 bp, Artificial Sequence
  Synthetic polynucleotide
tattttacccattgttttctcatacrggttataagcacatgtccttggccc

SEQ ID NO: 4594 - DNA, 51 bp, Artificial Sequence
  Synthetic polynucleotide
tcatatctgttttcacagcccaattrtacagaaatccgacagtactgcaat

SEQ ID NO: 4595 - DNA, 51 bp, Artificial Sequence
  Synthetic polynucleotide
gctcggcggcggcgggcgcgggaagrtggcggcagcggcggcggcggctgc

SEQ ID NO: 4596 - DNA, 51 bp, Artificial Sequence
  Synthetic polynucleotide
taaaatttttctttgggaaattaccrggttctgaagtaattgttggagtaa

SEQ ID NO: 4597 - DNA, 51 bp, Artificial Sequence
  Synthetic polynucleotide
agtgggcagcccatccctcgagtggdatacatggaggaagaaaagaaaaca

SEQ ID NO: 4598 - DNA, 51 bp, Artificial Sequence
  Synthetic polynucleotide
cagattgactttccattccagatttrctggtttactgtggagtttgggctc

SEQ ID NO: 4599 - DNA, 51 bp, Artificial Sequence
  Synthetic polynucleotide
tgattatttctttttccctcctaccrggaaataataaactttacatgtttg

SEQ ID NO: 4600 - DNA, 51 bp, Artificial Sequence
  Synthetic polynucleotide
attaacgtgggtgtctcattgcctcrgagaacacagcgcagcacggaaatt

SEQ ID NO: 4601 - DNA, 51 bp, Artificial Sequence
  Synthetic polynucleotide
ttctctctttttgttttgtttttccrgattcgctttgtggtggaactcgtg

SEQ ID NO: 4602 - DNA, 51 bp, Artificial Sequence
  Synthetic polynucleotide
ccccgtgacccctgactctgcccccrgagccctcggcagtctctcttcttc

SEQ ID NO: 4603 - DNA, 51 bp, Artificial Sequence
  Synthetic polynucleotide
taatgttctttatttcttcttttttrgataaaatcagtggttctggaagta

SEQ ID NO: 4604 - DNA, 51 bp, Artificial Sequence
  Synthetic polynucleotide
tgcactgcttgtggacaacaggtcartcattttcaaaaagattccatttat

SEQ ID NO: 4605 - DNA, 51 bp, Artificial Sequence
  Synthetic polynucleotide
cttctattaccgtggcgacacgctgrtggcggccaccctcgggcagcacaa

SEQ ID NO: 4606 - DNA, 51 bp, Artificial Sequence
  Synthetic polynucleotide
atgtattgcaatttgtaacgttaatrgcttgcgccgggcacaatagttgaa

SEQ ID NO: 4607 - DNA, 51 bp, Artificial Sequence
  Synthetic polynucleotide
atagtatttgcctttattgcaagggragtccttaggcatgatttttgagaa

SEQ ID NO: 4608 - DNA, 51 bp, Artificial Sequence
  Synthetic polynucleotide
gagccctcccaggtcatcttctgcartcgcagtccgcgcgtcgtgctgccc

SEQ ID NO: 4609 - DNA, 51 bp, Artificial Sequence
  Synthetic polynucleotide
ccaaccttgacctgttttgtgttccrgggagaacgaggcaagccggggctc

SEQ ID NO: 4610 - DNA, 51 bp, Artificial Sequence
  Synthetic polynucleotide
aatgaataacaatttaatgcttttcrggctttcaaaaagcaatggtcaaga

SEQ ID NO: 4611 - DNA, 51 bp, Artificial Sequence
  Synthetic polynucleotide
tcaacagtgtccttcattcccccacrgaactgcccaagatggaatccaagg

SEQ ID NO: 4612 - DNA, 51 bp, Artificial Sequence
  Synthetic polynucleotide
caggccctctctgctcccttgctctrgggaccgcctgactcacaatgacat

SEQ ID NO: 4613 - DNA, 51 bp, Artificial Sequence
  Synthetic polynucleotide
aagaggtcataataggcttctttcavattttcagtttacatagagttttaa

SEQ ID NO: 4614 - DNA, 51 bp, Artificial Sequence
  Synthetic polynucleotide
agtgggatcacatgtgccaacaggtrtagacaatctctttcactgtggctt

SEQ ID NO: 4615 - DNA, 51 bp, Artificial Sequence
  Synthetic polynucleotide
aaacgttgttgcatttgtctgtttcrgttactggtggaagagttgcccctg

SEQ ID NO: 4616 - DNA, 51 bp, Artificial Sequence
  Synthetic polynucleotide
agctgtgaatgcttcattcaggcccragtaaatataggaagaggtgtagtg

SEQ ID NO: 4617 - DNA, 51 bp, Artificial Sequence
  Synthetic polynucleotide
gctgtgaatgcttcattcaggcccargtaaatataggaagaggtgtagtgg

SEQ ID NO: 4618 - DNA, 51 bp, Artificial Sequence
  Synthetic polynucleotide
tgttgcaattttcttcttcctttgtrgaccttttcaagcaagtggcaagtt

SEQ ID NO: 4619 - DNA, 51 bp, Artificial Sequence
  Synthetic polynucleotide
gagatgatgacacgttctccagttavggtaagaacataggccgtctcagtg

SEQ ID NO: 4620 - DNA, 51 bp, Artificial Sequence
  Synthetic polynucleotide
ttgctctgcccctgcccttctccccrgtgggccccaccatcctgaataaga

SEQ ID NO: 4621 - DNA, 51 bp, Artificial Sequence
  Synthetic polynucleotide
agatttacttttccttttcatggacrgggctgccggtcacttgctgcaggg

SEQ ID NO: 4622 - DNA, 51 bp, Artificial Sequence
  Synthetic polynucleotide
gttagctccttcttgccaaccaaccrtgagctcccagattcgtcagaatta

SEQ ID NO: 4623 - DNA, 51 bp, Artificial Sequence
  Synthetic polynucleotide
gtgcagagcttttcctgcttaccctrcgggcgtctggcctaccacctggct

SEQ ID NO: 4624 - DNA, 51 bp, Artificial Sequence
  Synthetic polynucleotide
tactaaattttttgctaggatggcadtggctatattagtgctgcagaactt

SEQ ID NO: 4625 - DNA, 51 bp, Artificial Sequence
  Synthetic polynucleotide
acacagtgcaagcgcgtaggaacacratgctgggtgtttgggtgagtaatc

SEQ ID NO: 4626 - DNA, 51 bp, Artificial Sequence
  Synthetic polynucleotide
ggaccagcgcacagcaaacagatacytgagggagagctgcagcgaagtcaa

SEQ ID NO: 4627 - DNA, 51 bp, Artificial Sequence
  Synthetic polynucleotide
tacttctgttttataaaggtggactvtgcgccctcattaatggctcggctt

SEQ ID NO: 4628 - DNA, 51 bp, Artificial Sequence
  Synthetic polynucleotide
aatttcatccattgccagacgaccgyattctgtgaagagctttaaaaaaga

SEQ ID NO: 4629 - DNA, 51 bp, Artificial Sequence
  Synthetic polynucleotide
gtcatggtgtccctgctgacagattrctcacctcagctccagaagcctaaa

SEQ ID NO: 4630 - DNA, 51 bp, Artificial Sequence
  Synthetic polynucleotide
aataaagtgcagctgaagggccgtgrccttctcactctaaaaaactttacc

SEQ ID NO: 4631 - DNA, 51 bp, Artificial Sequence
  Synthetic polynucleotide
actctaaaaaactttaccggagaagraattaaatatatgctatggctatca

SEQ ID NO: 4632 - DNA, 51 bp, Artificial Sequence
  Synthetic polynucleotide
tcgtcctttacacaattaaaagaagdtgctgtttaatctgaggatcctgtt

SEQ ID NO: 4633 - DNA, 51 bp, Artificial Sequence
  Synthetic polynucleotide
cttaggcatgatttttgagaaaagargtactcgaacaagattgtctacaga

SEQ ID NO: 4634 - DNA, 51 bp, Artificial Sequence
  Synthetic polynucleotide
gatttttgagaaaagaagtactcgarcaagattgtctacagaaacaggtaa

SEQ ID NO: 4635 - DNA, 51 bp, Artificial Sequence
  Synthetic polynucleotide
tgttttcttaccacacaagatattcdtttgggtgtgaatgaaagtctcacg

SEQ ID NO: 4636 - DNA, 51 bp, Artificial Sequence
  Synthetic polynucleotide
ttgggtgtgaatgaaagtctcacggrcacggcccggtttgtaaatattttc

SEQ ID NO: 4637 - DNA, 51 bp, Artificial Sequence
  Synthetic polynucleotide
  misc_feature (26)..(26): n is a, c, g, t or u
gattatctttttcttggtttgccacngtgtattgtctagcatggcagatgc

SEQ ID NO: 4638 - DNA, 51 bp, Artificial Sequence
  Synthetic polynucleotide
taaagaagcatccatcccaattatcratgggctgtcagatttgtaccatcc

SEQ ID NO: 4639 - DNA, 51 bp, Artificial Sequence
  Synthetic polynucleotide
aaagaagcatccatcccaattatcartgggctgtcagatttgtaccatcct

SEQ ID NO: 4640 - DNA, 51 bp, Artificial Sequence
  Synthetic polynucleotide
atcaatgggctgtcagatttgtaccvtcctatccagatcctggctgattac

SEQ ID NO: 4641 - DNA, 51 bp, Artificial Sequence
  Synthetic polynucleotide
taccatcctatccagatcctggctgdttacctcacgctccaggttggttta

SEQ ID NO: 4642 - DNA, 51 bp, Artificial Sequence
  Synthetic polynucleotide
catcctatccagatcctggctgattrcctcacgctccaggttggtttattt

SEQ ID NO: 4643 - DNA, 51 bp, Artificial Sequence
  Synthetic polynucleotide
tcatctccttcatcccgtgccttttrggaacactatagctctctgaaaggt

SEQ ID NO: 4644 - DNA, 51 bp, Artificial Sequence
  Synthetic polynucleotide
tctccttcatcccgtgccttttaggracactatagctctctgaaaggtctt

SEQ ID NO: 4645 - DNA, 51 bp, Artificial Sequence
  Synthetic polynucleotide
tcatcccgtgccttttaggaacactrtagctctctgaaaggtcttaccctc

SEQ ID NO: 4646 - DNA, 51 bp, Artificial Sequence
  Synthetic polynucleotide
cctcagctggatcggggatgggaacratatcctgcactccatcatgatgag

SEQ ID NO: 4647 - DNA, 51 bp, Artificial Sequence
  Synthetic polynucleotide
ctcagctggatcggggatgggaacartatcctgcactccatcatgatgagc

SEQ ID NO: 4648 - DNA, 51 bp, Artificial Sequence
  Synthetic polynucleotide
tgggaacaatatcctgcactccatcrtgatgagcgcagcgaaattcggaat

SEQ ID NO: 4649 - DNA, 51 bp, Artificial Sequence
  Synthetic polynucleotide
aagttggcagagcagtatgccaaagdggtatgctctttacatgtaaagcta

SEQ ID NO: 4650 - DNA, 51 bp, Artificial Sequence
  Synthetic polynucleotide
tggcagagcagtatgccaaagaggtrtgctctttacatgtaaagctattat

SEQ ID NO: 4651 - DNA, 51 bp, Artificial Sequence
  Synthetic polynucleotide
tttaaccagcgtgtttatgtatgctrgaatggtaccaagctgttgctgaca

SEQ ID NO: 4652 - DNA, 51 bp, Artificial Sequence
  Synthetic polynucleotide
catggaggcaatgtattaattacagrcacttggataagcatgggacaagaa

SEQ ID NO: 4653 - DNA, 51 bp, Artificial Sequence
  Synthetic polynucleotide
tggaggcaatgtattaattacagacrcttggataagcatgggacaagaaga

SEQ ID NO: 4654 - DNA, 51 bp, Artificial Sequence
  Synthetic polynucleotide
gctgcctctgactggacatttttacdctgcttgcccagaaagccagaagaa

SEQ ID NO: 4655 - DNA, 51 bp, Artificial Sequence
  Synthetic polynucleotide
cactgcttgcccagaaagccagaagragtggatgatgaagtcttttattct

SEQ ID NO: 4656 - DNA, 51 bp, Artificial Sequence
  Synthetic polynucleotide
actagtgttcccagaggcagaaaacrgaaagtggacaatcatggtaagcaa

SEQ ID NO: 4657 - DNA, 51 bp, Artificial Sequence
  Synthetic polynucleotide
gggctcaagaacggcatgaagtactrccgggacacagacacccctggcagg

SEQ ID NO: 4658 - DNA, 51 bp, Artificial Sequence
  Synthetic polynucleotide
agcctgcagcccctacttctgtgcgdtgttcacaggtatggtgagtggcca

SEQ ID NO: 4659 - DNA, 51 bp, Artificial Sequence
  Synthetic polynucleotide
ctcacatcagtattaaaacgacttaygtagcgctccggatgtttgtcatac

SEQ ID NO: 4660 - DNA, 51 bp, Artificial Sequence
  Synthetic polynucleotide
tcctaccgagttcgagccctggactrctgggcccgaccaggccccttctcg

SEQ ID NO: 4661 - DNA, 51 bp, Artificial Sequence
  Synthetic polynucleotide
gtgtaacagttcctgcatgggcggcvtgaaccggaggcccatcctcaccat

SEQ ID NO: 4662 - DNA, 51 bp, Artificial Sequence
  Synthetic polynucleotide
gccatgatgagatcacccaagtaatyggggtggcgaacaaagccccaccat

SEQ ID NO: 4663 - DNA, 51 bp, Artificial Sequence
  Synthetic polynucleotide
attaaaaaatatttttatttcctctrgggtcctactggtcctattggtcct

SEQ ID NO: 4664 - DNA, 51 bp, Artificial Sequence
  Synthetic polynucleotide
tcttgaaattgtatttaattttttcrgggccctcctggtcctcctggaact

SEQ ID NO: 4665 - DNA, 51 bp, Artificial Sequence
  Synthetic polynucleotide
cattgtgatgtcatgatactttcttdgggacctgttggacccagtggacct

SEQ ID NO: 4666 - DNA, 51 bp, Artificial Sequence
  Synthetic polynucleotide
aaaagagctcttgaaattgtatttarttttttcagggccctcctggtcctc

SEQ ID NO: 4667 - DNA, 51 bp, Artificial Sequence
  Synthetic polynucleotide
acagagtgtatcattatacttttctdggggcctggtggtgacaaaggagac

SEQ ID NO: 4668 - DNA, 51 bp, Artificial Sequence
  Synthetic polynucleotide
cttctcaattgaatgttttcatcttrgggccctgctggccctgctggtgct

SEQ ID NO: 4669 - DNA, 51 bp, Artificial Sequence
  Synthetic polynucleotide
agtaaataccgaccacttcttctttrgggtgctcctggtaagaatggagaa

SEQ ID NO: 4670 - DNA, 51 bp, Artificial Sequence
  Synthetic polynucleotide
ctttttggcaataatgaaaaggtaarttgatcaagagagaggaaataggca

SEQ ID NO: 4671 - DNA, 51 bp, Artificial Sequence
  Synthetic polynucleotide
agtgatggtcagtgtgtcgtagaggycacacagagtgtcaaatttccactc

SEQ ID NO: 4672 - DNA, 51 bp, Artificial Sequence
  Synthetic polynucleotide
tttgttacttgttggtgatttatgcygactccgccttctgttatcattcga

SEQ ID NO: 4673 - DNA, 51 bp, Artificial Sequence
  Synthetic polynucleotide
actgtcacggagttccagcccctctrttacgtggcagagagttttaatgat

SEQ ID NO: 4674 - DNA, 51 bp, Artificial Sequence
  Synthetic polynucleotide
ttccactgcacacagtacatcagacdtggatccaagcccatgtataccccc

SEQ ID NO: 4675 - DNA, 51 bp, Artificial Sequence
  Synthetic polynucleotide
attgcccagaacatagttggaatagygtttgccacagaggcccagagaaag

SEQ ID NO: 4676 - DNA, 51 bp, Artificial Sequence
  Synthetic polynucleotide
ccagctagccccagacttcggccccrtgcggctcacccgctgccaggctgc

SEQ ID NO: 4677 - DNA, 51 bp, Artificial Sequence
  Synthetic polynucleotide
gtatggacttggaagccctaggtccragagagccttggagaatttacttcc

SEQ ID NO: 4678 - DNA, 51 bp, Artificial Sequence
  Synthetic polynucleotide
taatgtatactgtatgtttacccaargaagtttcctatcagaggtttggaa

SEQ ID NO: 4679 - DNA, 51 bp, Artificial Sequence
  Synthetic polynucleotide
gcccatgaagacctcatagaaatcayaggacaagcctttggcaccaaacat

SEQ ID NO: 4680 - DNA, 51 bp, Artificial Sequence
  Synthetic polynucleotide
tgattccttcagcaggtacaggctgycatcttccagaaagctgtgggccaa

SEQ ID NO: 4681 - DNA, 51 bp, Artificial Sequence
  Synthetic polynucleotide
tgttctttctttctttataatttatrgattttgcatgctgaaacttctcaa

SEQ ID NO: 4682 - DNA, 51 bp, Artificial Sequence
  Synthetic polynucleotide
aaattaaacttctcccattcctttcrgagggaaccccttacctggaatctg

SEQ ID NO: 4683 - DNA, 51 bp, Artificial Sequence
  Synthetic polynucleotide
ggaaatgacaatcaagtttcttacaytgtatcaataatgttgccaactttg

SEQ ID NO: 4684 - DNA, 51 bp, Artificial Sequence
  Synthetic polynucleotide
ttttggaagagattcatagtcctccyggaaaacacaagactccccatgtta

SEQ ID NO: 4685 - DNA, 51 bp, Artificial Sequence
  Synthetic polynucleotide
accaatgccccgccgttctccacgaygggctataaagaagtaatcatcaca

SEQ ID NO: 4686 - DNA, 51 bp, Artificial Sequence
  Synthetic polynucleotide
aagccaccgatatctaggtaatccayaatttgtcatcctggctttcaaagt

SEQ ID NO: 4687 - DNA, 51 bp, Artificial Sequence
  Synthetic polynucleotide
gtcactcggatctttccagacaaggycagagtggggaggttgccctgcatc

SEQ ID NO: 4688 - DNA, 51 bp, Artificial Sequence
  Synthetic polynucleotide
tggttcccagaagactgagagttcarccgaaggtaaagaacaagaagagaa

SEQ ID NO: 4689 - DNA, 51 bp, Artificial Sequence
  Synthetic polynucleotide
ctgtggacccccaactctcactatgyggattcgaggctcatacttatgcaa

SEQ ID NO: 4690 - DNA, 51 bp, Artificial Sequence
  Synthetic polynucleotide
agccttccagacccagaagccattgraatctacctctctttcactgtttta

SEQ ID NO: 4691 - DNA, 51 bp, Artificial Sequence
  Synthetic polynucleotide
gctgggctcagcgatgggcccaaggrgccggcgccaaaggggcgcggcgcg

SEQ ID NO: 4692 - DNA, 51 bp, Artificial Sequence
  Synthetic polynucleotide
ccagcaggtcttcgatgccaagaacrtgatggctgcctgtgacccccgcca

SEQ ID NO: 4693 - DNA, 51 bp, Artificial Sequence
  Synthetic polynucleotide
tgcttctatttgttccctttcttacrgatttaatgtgtgccgaccatttcc

SEQ ID NO: 4694 - DNA, 51 bp, Artificial Sequence
  Synthetic polynucleotide
ctccgtcatgtgctgtgactgcttgyagatggccatggcgcggacgcgggt

SEQ ID NO: 4695 - DNA, 51 bp, Artificial Sequence
  Synthetic polynucleotide
tttcgacatagtgtggtggtgccctvtgagccgcctgaggtctggtttgca

SEQ ID NO: 4696 - DNA, 51 bp, Artificial Sequence
  Synthetic polynucleotide
ggctctgactgtaccaccatccactrcaactacatgtgtaacagttcctgc

SEQ ID NO: 4697 - DNA, 51 bp, Artificial Sequence
  Synthetic polynucleotide
cacagtccgaccctgagcacgcccaygttccccgcaggccggaacagcccc

SEQ ID NO: 4698 - DNA, 51 bp, Artificial Sequence
  Synthetic polynucleotide
atctaatattatctcttctgtatttrggttcgactagtgatagtggatggt

SEQ ID NO: 4699 - DNA, 51 bp, Artificial Sequence
  Synthetic polynucleotide
tctacagcagcaaaggccaccactcyttcccctgggagacataaaatcgtt

SEQ ID NO: 4700 - DNA, 51 bp, Artificial Sequence
  Synthetic polynucleotide
aaaagatcctgagaagaaaactcctyctacagcagcaaaggccaccactct

SEQ ID NO: 4701 - DNA, 51 bp, Artificial Sequence
  Synthetic polynucleotide
cactcgaacgacccattcaacgtctdcatcgagtccgatgcctggcaagag

SEQ ID NO: 4702 - DNA, 51 bp, Artificial Sequence
  Synthetic polynucleotide
ttcactgctgaacgaagtattgaagrtgaactaaatcgtgaaagtgacagt

SEQ ID NO: 4703 - DNA, 51 bp, Artificial Sequence
  Synthetic polynucleotide
ctggggctgtgtcccactcaccctgygcagagctgacacagtctgaaagga

SEQ ID NO: 4704 - DNA, 51 bp, Artificial Sequence
  Synthetic polynucleotide
gggtggccaggcgagagcgtggaggrgaacgccaatgtggtggtgcggctg

SEQ ID NO: 4705 - DNA, 51 bp, Artificial Sequence
  Synthetic polynucleotide
tttgtatatatattttttatctttcrgcctcagggatttagagatactgtt

SEQ ID NO: 4706 - DNA, 51 bp, Artificial Sequence
  Synthetic polynucleotide
tgtatttttaaaaatcatttcttatrggtatgttcacatacgatgaatcta

SEQ ID NO: 4707 - DNA, 51 bp, Artificial Sequence
  Synthetic polynucleotide
tccttggcaatgtaaacagccactcyggtttttccactccctgtagggagg

SEQ ID NO: 4708 - DNA, 51 bp, Artificial Sequence
  Synthetic polynucleotide
gccacacagaacaggaacagcaccaygtagatgattttgtacattacgatt

SEQ ID NO: 4709 - DNA, 51 bp, Artificial Sequence
  Synthetic polynucleotide
accgccaaacagaactacgtcaagcrcatgttcgtacacacaggtgagtgt

SEQ ID NO: 4710 - DNA, 51 bp, Artificial Sequence
  Synthetic polynucleotide
tgcctgatactacgtccatctcaccygttctgctcccaccatgctaattgg

SEQ ID NO: 4711 - DNA, 51 bp, Artificial Sequence
  Synthetic polynucleotide
aagcacatggccgactaccccgactrcaagtaccggccccggaaaaagccc

SEQ ID NO: 4712 - DNA, 51 bp, Artificial Sequence
  Synthetic polynucleotide
ttcagaccctgaggccgaggggggarcaatggggcccttgagggcccctcc

SEQ ID NO: 4713 - DNA, 51 bp, Artificial Sequence
  Synthetic polynucleotide
gatttacttcccgtggtttcttctcrgagctgaacaaatggccagtgttca

SEQ ID NO: 4714 - DNA, 51 bp, Artificial Sequence
  Synthetic polynucleotide
ggtgtctcctcatctcgctgctgtcyggaaggaaggaaggaatcacgccct

SEQ ID NO: 4715 - DNA, 51 bp, Artificial Sequence
  Synthetic polynucleotide
aatctcagccaagcttgttgcaaatrtgctatctgtagcaggtgcagatca

SEQ ID NO: 4716 - DNA, 51 bp, Artificial Sequence
  Synthetic polynucleotide
tcgccctcgccctcgacccgcagccrtggtgcccggggtgcccggcgcggt

SEQ ID NO: 4717 - DNA, 51 bp, Artificial Sequence
  Synthetic polynucleotide
tggtgcttctttgaggatgatgtcartgagttcacctgccctgtgtgtttc

SEQ ID NO: 4718 - DNA, 51 bp, Artificial Sequence
  Synthetic polynucleotide
cacaaagtcagctccacataaatgaytgagtttgcccttggacccatcatt

SEQ ID NO: 4719 - DNA, 51 bp, Artificial Sequence
  Synthetic polynucleotide
tttctctcacacctgaactttaagtygtctgtttggaagatctgtatagag

SEQ ID NO: 4720 - DNA, 51 bp, Artificial Sequence
  Synthetic polynucleotide
cttttctactccttgtattttgtgcrggtctgcagactcgtgaatgaggtc

SEQ ID NO: 4721 - DNA, 51 bp, Artificial Sequence
  Synthetic polynucleotide
gggcttcttgcattctgggacagccdagtctgtgacttgcacggtcagttg

SEQ ID NO: 4722 - DNA, 51 bp, Artificial Sequence
  Synthetic polynucleotide
cgtgtttgtgcctgtcctgggagagdccggcgcacagaggaagagaatctc

SEQ ID NO: 4723 - DNA, 51 bp, Artificial Sequence
  Synthetic polynucleotide
cccctgcctggctgccctccctctcrggtctgctggcaggactgtgggagt

SEQ ID NO: 4724 - DNA, 51 bp, Artificial Sequence
  Synthetic polynucleotide
tctcctccctgcttctgtctcctacrgccacctgaagtccaaaaagggtca

SEQ ID NO: 4725 - DNA, 51 bp, Artificial Sequence
  Synthetic polynucleotide
ggcttctcttttttttctgtccaccrgggagtaactattcccagtcagagg

SEQ ID NO: 4726 - DNA, 51 bp, Artificial Sequence
  Synthetic polynucleotide
atatattttaattttgtgcccttgcrgattgatcacttattcattagtaat

SEQ ID NO: 4727 - DNA, 51 bp, Artificial Sequence
  Synthetic polynucleotide
tggaaagggacgaactggtgtaatgrtatgtgcatatttattacatcgggg

SEQ ID NO: 4728 - DNA, 51 bp, Artificial Sequence
  Synthetic polynucleotide
taaattattttctgtttgatttgccdgtttagatgcaaaatccacaagtat

SEQ ID NO: 4729 - DNA, 51 bp, Artificial Sequence
  Synthetic polynucleotide
ggtccaacagcaacagtatatgggtragagttgtcaagattaaggcaaaca

SEQ ID NO: 4730 - DNA, 51 bp, Artificial Sequence
  Synthetic polynucleotide
tggaccaaaatagacaatcttgaagvtacaattgtcttaaactggagaaaa

SEQ ID NO: 4731 - DNA, 51 bp, Artificial Sequence
  Synthetic polynucleotide
catctgagcattgtgaccctggaggrggcaccatttgtcattgtggaaagt

SEQ ID NO: 4732 - DNA, 51 bp, Artificial Sequence
  Synthetic polynucleotide
tgtagctatacgttagctcttgcacrtgctgtgtggcaccattctagcatc

SEQ ID NO: 4733 - DNA, 51 bp, Artificial Sequence
  Synthetic polynucleotide
gaaacacatgaaattgtggcgatcargaaattcaaggacagtgaaggtaga

SEQ ID NO: 4734 - DNA, 51 bp, Artificial Sequence
  Synthetic polynucleotide
ctaatcaaggctattcactggtgccrtaagaatgatattgtccatcgaggt

SEQ ID NO: 4735 - DNA, 51 bp, Artificial Sequence
  Synthetic polynucleotide
agcgctccctatggaaagtccgtggrcatgtggtcggtgggctgtattctt

SEQ ID NO: 4736 - DNA, 51 bp, Artificial Sequence
  Synthetic polynucleotide
tgaccatgccagcccatgggccacgytgaaattccctttttcacacactgc

SEQ ID NO: 4737 - DNA, 51 bp, Artificial Sequence
  Synthetic polynucleotide
ctcctgcatgaaatgatacatgcctrtttatttgtcactaataacgacaaa

SEQ ID NO: 4738 - DNA, 51 bp, Artificial Sequence
  Synthetic polynucleotide
ggaggatgaactggaccaagccagcrcccctacagacgtgcgggatatcga

SEQ ID NO: 4739 - DNA, 51 bp, Artificial Sequence
  Synthetic polynucleotide
agggtcatgttcgtaggtgtatttcygttccaattcctccaactttttaag

SEQ ID NO: 4740 - DNA, 51 bp, Artificial Sequence
  Synthetic polynucleotide
gttggattcttccatgttcatcactyttgtgtttgtgcccagaatgttaaa

SEQ ID NO: 4741 - DNA, 51 bp, Artificial Sequence
  Synthetic polynucleotide
gatgcctgcacagttgacagctacayccacacggccaaactttccttttgc

SEQ ID NO: 4742 - DNA, 51 bp, Artificial Sequence
  Synthetic polynucleotide
cgcgcggaccgggagctacccggtgrgaagtcctggtgctggtaccgacct

SEQ ID NO: 4743 - DNA, 51 bp, Artificial Sequence
  Synthetic polynucleotide
cgagaaaaccgtcttcaccgtcttcrtgctagctgcctctggcatctgcat

SEQ ID NO: 4744 - DNA, 51 bp, Artificial Sequence
  Synthetic polynucleotide
ttacccccagcagaggtgaaggaagrcagtgcgtacgggagccagtcagtg

SEQ ID NO: 4745 - DNA, 51 bp, Artificial Sequence
  Synthetic polynucleotide
tgttacagaaattaagtattgcaacytactgagggctttgaaggctcttgg

SEQ ID NO: 4746 - DNA, 51 bp, Artificial Sequence
  Synthetic polynucleotide
ttcctcacaggtttctactccaaagrccacatcatcgaaaccgcaaacata

SEQ ID NO: 4747 - DNA, 51 bp, Artificial Sequence
  Synthetic polynucleotide
gtaatactttccaaaggcatggtctytgtcaatatttggatacagatactt

SEQ ID NO: 4748 - DNA, 51 bp, Artificial Sequence
  Synthetic polynucleotide
gggaaagtaacagcagaaagttcttycttcgtgtagggttcaaccgcatgg

SEQ ID NO: 4749 - DNA, 51 bp, Artificial Sequence
  Synthetic polynucleotide
gcattcgatgttcctcttaaagtggrtctcatcacctttgatacccccttt

SEQ ID NO: 4750 - DNA, 51 bp, Artificial Sequence
  Synthetic polynucleotide
tacttacatacttgtttaacacttcrgggaagaaaagtcagaagaccagga

SEQ ID NO: 4751 - DNA, 51 bp, Artificial Sequence
  Synthetic polynucleotide
  misc_feature (26)..(26): n is a, c, g, t or u
cttgtgtctttctgtttgtccccacngtccccagggaaaagcctttcgctc

SEQ ID NO: 4752 - DNA, 51 bp, Artificial Sequence
  Synthetic polynucleotide
tttccttctgcttcttttcccttgcrggaaacacatgaaattgtggcgatc

SEQ ID NO: 4753 - DNA, 51 bp, Artificial Sequence
  Synthetic polynucleotide
acaactttggactttgctatctttcrggttttgctcgtaatctgtcagaag

SEQ ID NO: 4754 - DNA, 51 bp, Artificial Sequence
  Synthetic polynucleotide
gatatacttcttttgtttttaacatrgaaaccaagccggcaaaagtactgc

SEQ ID NO: 4755 - DNA, 51 bp, Artificial Sequence
  Synthetic polynucleotide
ttggcagtgcaagtgcatgcctggcrgttgtactacagcaagaagctccta

SEQ ID NO: 4756 - DNA, 51 bp, Artificial Sequence
  Synthetic polynucleotide
aactgagctctatgggacaggagcartggattttggagtaggtggctttgt

SEQ ID NO: 4757 - DNA, 51 bp, Artificial Sequence
  Synthetic polynucleotide
tcgcaggcgcaggtctatgagctggrgcggcgcttcaagcagcagcggtac

SEQ ID NO: 4758 - DNA, 51 bp, Artificial Sequence
  Synthetic polynucleotide
cgccgaggtgggcgcgggcggcaacragagccgccttactctctccatgtc

SEQ ID NO: 4759 - DNA, 51 bp, Artificial Sequence
  Synthetic polynucleotide
gcggagcaacagagacatctgacgghaagcaacagcctatggtacagaata

SEQ ID NO: 4760 - DNA, 51 bp, Artificial Sequence
  Synthetic polynucleotide
gatgacccatattctgtttcttactrggaatcaaccctcaaaagcgtattg

SEQ ID NO: 4761 - DNA, 51 bp, Artificial Sequence
  Synthetic polynucleotide
ttcaatgagctgaagccagctgtggwtggggcaaacttcattgttaaccac

SEQ ID NO: 4762 - DNA, 51 bp, Artificial Sequence
  Synthetic polynucleotide
gcagggtttgtgcaagtttgcaaacrtgttcaccctgtctcagacctcgag

SEQ ID NO: 4763 - DNA, 51 bp, Artificial Sequence
  Synthetic polynucleotide
aatgcttcggactctcaagcaggaaracattgtggagttgaaggaagcatt

SEQ ID NO: 4764 - DNA, 51 bp, Artificial Sequence
  Synthetic polynucleotide
aattttttttttatcttgacactccrgatataaaaccagaaaatctcttaa

SEQ ID NO: 4765 - DNA, 51 bp, Artificial Sequence
  Synthetic polynucleotide
ttaatcagccacaatgatgtcctaaractgtgtgactttggtaagttaaaa

SEQ ID NO: 4766 - DNA, 51 bp, Artificial Sequence
  Synthetic polynucleotide
acttcaagggcttcttttatcgtttyaaggttgtctctttccttggttaga

SEQ ID NO: 4767 - DNA, 51 bp, Artificial Sequence
  Synthetic polynucleotide
attttaccaaatttttgtatttgatrgatcccattgaagaggaagatgcaa

SEQ ID NO: 4768 - DNA, 51 bp, Artificial Sequence
  Synthetic polynucleotide
gtgtttaaaactatgcaaatggtaaytgcaagatctacaaaaggatccatt

SEQ ID NO: 4769 - DNA, 51 bp, Artificial Sequence
  Synthetic polynucleotide
  misc_feature (26)..(26): n is a, c, g, t or u
tattagtattaatttgtattattcantttttttccccagtatgagaataat

SEQ ID NO: 4770 - DNA, 51 bp, Artificial Sequence
  Synthetic polynucleotide
ttaatacagattttaaattctttacrgtgcacttcagaaggagatcacaac

SEQ ID NO: 4771 - DNA, 51 bp, Artificial Sequence
  Synthetic polynucleotide
atccagaccaccttcatagccaacaytgtcaaaagcaaaactcttcttcat

SEQ ID NO: 4772 - DNA, 51 bp, Artificial Sequence
  Synthetic polynucleotide
atgtgggacattattttttctttgcragggagaactaatgcctcacaggac

SEQ ID NO: 4773 - DNA, 51 bp, Artificial Sequence
  Synthetic polynucleotide
taagtcaggaggtatttcttgttctrgggtgaatttgtgaatgagtatgtg

SEQ ID NO: 4774 - DNA, 51 bp, Artificial Sequence
  Synthetic polynucleotide
aaaggaaactatgctcggttcatgartcattgctgccagcccaactgtgaa

SEQ ID NO: 4775 - DNA, 51 bp, Artificial Sequence
  Synthetic polynucleotide
ggtgaaatcacaaaggagcgagaagrtgagtgttttagttgtggggatgct

SEQ ID NO: 4776 - DNA, 51 bp, Artificial Sequence
  Synthetic polynucleotide
aatcctagacatggttcaagtgaggrctacctacacatggtgcacaggcta

SEQ ID NO: 4777 - DNA, 51 bp, Artificial Sequence
  Synthetic polynucleotide
tgtttttttctcttcatttttctttrgcttgatatgcaacgaggtgttcat

SEQ ID NO: 4778 - DNA, 51 bp, Artificial Sequence
  Synthetic polynucleotide
ccactacgacgacccgggcaagggcractactggatgctggacccgtcgag

SEQ ID NO: 4779 - DNA, 51 bp, Artificial Sequence
  Synthetic polynucleotide
aagccaaaacgactgcaggagtggtrcaaaaagatgctggacaaggcgttt

SEQ ID NO: 4780 - DNA, 51 bp, Artificial Sequence
  Synthetic polynucleotide
ctcacctgctccttctggacttcctrgggctgcagaccacaagactgggaa

SEQ ID NO: 4781 - DNA, 51 bp, Artificial Sequence
  Synthetic polynucleotide
ttttttttttctccttattgttttargatctattctccagatcacactaac

SEQ ID NO: 4782 - DNA, 51 bp, Artificial Sequence
  Synthetic polynucleotide
ttaactttgtctcttctcttcttatrggacctgtacctgcctctgtccttg

SEQ ID NO: 4783 - DNA, 51 bp, Artificial Sequence
  Synthetic polynucleotide
tgtgcgtgtgcttctgaacaagaagrcagcccactcttttgagcaagtcct

SEQ ID NO: 4784 - DNA, 51 bp, Artificial Sequence
  Synthetic polynucleotide
ggagaacaaggactttgtgcgccccragctggttaccatcatccgcagtgg

SEQ ID NO: 4785 - DNA, 51 bp, Artificial Sequence
  Synthetic polynucleotide
caacagtgcacaggccagggagaacraggactttgtgcgccccaagctggt

SEQ ID NO: 4786 - DNA, 51 bp, Artificial Sequence
  Synthetic polynucleotide
caatcccaactggtctgtcaacgtadaaacatctgccaatatgaaagcccc

SEQ ID NO: 4787 - DNA, 51 bp, Artificial Sequence
  Synthetic polynucleotide
gacaacttctttaaaaaggtggagtrcaccaagaatgtcaatcccaactgg

SEQ ID NO: 4788 - DNA, 51 bp, Artificial Sequence
  Synthetic polynucleotide
aattgaaaaaatgggaggcgcgacargtagaggagaaaattcctatggtct

SEQ ID NO: 4789 - DNA, 51 bp, Artificial Sequence
  Synthetic polynucleotide
actgtcatacttctcctttgcccccrggacatgagaaacctgaggttcgct

SEQ ID NO: 4790 - DNA, 51 bp, Artificial Sequence
  Synthetic polynucleotide
gacttgaatttctttttttcctcacrgggcttgcccaatcaccattggaga

SEQ ID NO: 4791 - DNA, 51 bp, Artificial Sequence
  Synthetic polynucleotide
acagggcttgcccaatcaccattggrgaataacttttattaataagtgcta

SEQ ID NO: 4792 - DNA, 51 bp, Artificial Sequence
  Synthetic polynucleotide
ttggtggttccgtatcgtgcctcagrtgatgacctccggagagttgcaact

SEQ ID NO: 4793 - DNA, 51 bp, Artificial Sequence
  Synthetic polynucleotide
caatttttgattataattttggatcrtctgtatagttgccgatttggtact

SEQ ID NO: 4794 - DNA, 51 bp, Artificial Sequence
  Synthetic polynucleotide
tttgagatccttggggttgtaggtgraggtaagttggaatttttgcgttcc

SEQ ID NO: 4795 - DNA, 51 bp, Artificial Sequence
  Synthetic polynucleotide
gtggctaccaacattgatgagatctrtaaggccctgtcccgcaatagcagt

SEQ ID NO: 4796 - DNA, 51 bp, Artificial Sequence
  Synthetic polynucleotide
cctgccaccattcccctgtttgcacrggctgaccggtaccagcgcctgaag

SEQ ID NO: 4797 - DNA, 51 bp, Artificial Sequence
  Synthetic polynucleotide
gcctaacttgatttagggggaagaarccttaagaatagaggatatccttga

SEQ ID NO: 4798 - DNA, 51 bp, Artificial Sequence
  Synthetic polynucleotide
  misc_feature (26)..(26): n is a, c, g, t or u
ttggacatcctggataccgccggccnggaggagtacagcgccatgcgggac

SEQ ID NO: 4799 - DNA, 51 bp, Artificial Sequence
  Synthetic polynucleotide
ctagctggagggctgcatgcagggarggtcattaaaggttggtgatgaaac

SEQ ID NO: 4800 - DNA, 51 bp, Artificial Sequence
  Synthetic polynucleotide
tccattgcctacaccctgaccagcadtatcccggagatcacgcccttcctg

SEQ ID NO: 4801 - DNA, 51 bp, Artificial Sequence
  Synthetic polynucleotide
cagtgccgtagctcttatctagcaartgaaatcctgtggggccaccgctat

SEQ ID NO: 4802 - DNA, 51 bp, Artificial Sequence
  Synthetic polynucleotide
tacacttacagttttgtctttcacaytccaaaacacagcagctccttccct

SEQ ID NO: 4803 - DNA, 51 bp, Artificial Sequence
  Synthetic polynucleotide
gaaccttccaaactgaagcgctcctdctcctccccagatataacccaggct

SEQ ID NO: 4804 - DNA, 51 bp, Artificial Sequence
  Synthetic polynucleotide
caatgtttcagctctacgcactttcrgggtactgagggctttgaaaactat

SEQ ID NO: 4805 - DNA, 51 bp, Artificial Sequence
  Synthetic polynucleotide
ccccaggcaagccaggaagcagacartgttctgatcctgcaggacaggaag

SEQ ID NO: 4806 - DNA, 51 bp, Artificial Sequence
  Synthetic polynucleotide
gtccaaggcgcggcgcatggccgccracgtgcgggagcgcaagcgcatcct

SEQ ID NO: 4807 - DNA, 51 bp, Artificial Sequence
  Synthetic polynucleotide
gagtgagacgctgatgggaggatggrcgtactggtgtctgagtgctccgcg

SEQ ID NO: 4808 - DNA, 51 bp, Artificial Sequence
  Synthetic polynucleotide
tggcgagtgagacgctgatgggaggrtggacgtactggtgtctgagtgctc

SEQ ID NO: 4809 - DNA, 51 bp, Artificial Sequence
  Synthetic polynucleotide
ccgctggtggccgtgtattacaccarccgggccttgtgctacctgaagatg

SEQ ID NO: 4810 - DNA, 51 bp, Artificial Sequence
  Synthetic polynucleotide
atgggcatcctctgtcctatctcccrgatacagcatcatgcaggcctgctg

SEQ ID NO: 4811 - DNA, 51 bp, Artificial Sequence
  Synthetic polynucleotide
cataaggccccagcattcctgtatgrtatctacctcaggatgactggaaga

SEQ ID NO: 4812 - DNA, 51 bp, Artificial Sequence
  Synthetic polynucleotide
gccatcccaggcaggcgagtgttgcyctgcagacccagaatcacagccttg

SEQ ID NO: 4813 - DNA, 51 bp, Artificial Sequence
  Synthetic polynucleotide
tttgtgaaactgctttttgaaacagrgaaaatagatatagtactacatttt

SEQ ID NO: 4814 - DNA, 51 bp, Artificial Sequence
  Synthetic polynucleotide
tctgttttgttttccaagacccaccratgacatgagatacccaatgaagtc

SEQ ID NO: 4815 - DNA, 51 bp, Artificial Sequence
  Synthetic polynucleotide
gctcgacaggatattgaccaccgccygcggggataaagccagggagctggt

SEQ ID NO: 4816 - DNA, 51 bp, Artificial Sequence
  Synthetic polynucleotide
catcgccgggggctcgctgtcctccrcccccatgagcacgccgtgcagctc

SEQ ID NO: 4817 - DNA, 51 bp, Artificial Sequence
  Synthetic polynucleotide
acctctagcacttctctatgccaccrtcttcgggaatgtgacgactatttt

SEQ ID NO: 4818 - DNA, 51 bp, Artificial Sequence
  Synthetic polynucleotide
ttcgggaatgtgacgactattttccracagatgtatgccaacaccaacaga

SEQ ID NO: 4819 - DNA, 51 bp, Artificial Sequence
  Synthetic polynucleotide
ggacagaagaaactgtgccacttgtrtcaggaccacatgcagtacatcgga

SEQ ID NO: 4820 - DNA, 51 bp, Artificial Sequence
  Synthetic polynucleotide
gccaagtttttattccttttctcttycattcgcttctttatgtcttcaaga

SEQ ID NO: 4821 - DNA, 51 bp, Artificial Sequence
  Synthetic polynucleotide
acttagctacccactctatacccacrgaacggccacggcttcagctgccca

SEQ ID NO: 4822 - DNA, 51 bp, Artificial Sequence
  Synthetic polynucleotide
gctcaagaatggccaggagatccagrtgagcggcaggtgcagcctggggtg

SEQ ID NO: 4823 - DNA, 51 bp, Artificial Sequence
  Synthetic polynucleotide
tgttactatcttttgcttcttctgcrggaatcagaaggtcagggctgtcct

SEQ ID NO: 4824 - DNA, 51 bp, Artificial Sequence
  Synthetic polynucleotide
ttcttcatgcgctccaggtgggcgcyggtgtcctgctccttcttcagctcc

SEQ ID NO: 4825 - DNA, 51 bp, Artificial Sequence
  Synthetic polynucleotide
caagacaacctggcagatgctgaggrgcgctgtgatcagctgatcaaaaac

SEQ ID NO: 4826 - DNA, 51 bp, Artificial Sequence
  Synthetic polynucleotide
aatatcaaggggaagcctgaagcccrcttctccctgatccactatgccggc

SEQ ID NO: 4827 - DNA, 51 bp, Artificial Sequence
  Synthetic polynucleotide
caccacatgtttgtgctggagcaggrggagtacaagaaggagggcatcgag

SEQ ID NO: 4828 - DNA, 51 bp, Artificial Sequence
  Synthetic polynucleotide
gctgctgaagagtgcagaaagagagraggagatggcctccatgaaggagga

SEQ ID NO: 4829 - DNA, 51 bp, Artificial Sequence
  Synthetic polynucleotide
ctttcagactgtgtcagctctgcacrgggtgagtgggacacagccccagcc

SEQ ID NO: 4830 - DNA, 51 bp, Artificial Sequence
  Synthetic polynucleotide
cttccagaggctgacaagtctgcctrcctcatggggctgaactcagccgac

SEQ ID NO: 4831 - DNA, 51 bp, Artificial Sequence
  Synthetic polynucleotide
tacattgcactgtccccatctcaacrggtgctggagcagccggagtcctcc

SEQ ID NO: 4832 - DNA, 51 bp, Artificial Sequence
  Synthetic polynucleotide
tctgctaccgctgccccccttcccarggctacaatgacgactactatgaag

SEQ ID NO: 4833 - DNA, 51 bp, Artificial Sequence
  Synthetic polynucleotide
gtgcctctggctgccctggctgtccrctgccatgacacctatggtcaagcc

SEQ ID NO: 4834 - DNA, 51 bp, Artificial Sequence
  Synthetic polynucleotide
ctacgtgcccttctctgctggccccrggaactgtataggtttgtatccatc

SEQ ID NO: 4835 - DNA, 51 bp, Artificial Sequence
  Synthetic polynucleotide
gtcagcagggtggtctctattccacrgggcctacgcttctcaggggtcaat

SEQ ID NO: 4836 - DNA, 51 bp, Artificial Sequence
  Synthetic polynucleotide
tttgaattatttcattctttttctcrgttagtgattggcaactttggcctc

SEQ ID NO: 4837 - DNA, 51 bp, Artificial Sequence
  Synthetic polynucleotide
gtgtgattttcatggtgttttaaacrggaagaaacattaccaaggtcctca

SEQ ID NO: 4838 - DNA, 51 bp, Artificial Sequence
  Synthetic polynucleotide
aatatatattaatctttcattttccrgctgcgagttttcaagttggcaaaa

SEQ ID NO: 4839 - DNA, 51 bp, Artificial Sequence
  Synthetic polynucleotide
cctcaccctctgtggctgtgttttcrggcgttgggactccagctgcagctg

SEQ ID NO: 4840 - DNA, 51 bp, Artificial Sequence
  Synthetic polynucleotide
tgacattgctgggcctggggcttacrggatgcccaggctgaggaagagatc

SEQ ID NO: 4841 - DNA, 51 bp, Artificial Sequence
  Synthetic polynucleotide
tgattttgacttcacggtaactgggrgagggagcccctcccggcgagagca

SEQ ID NO: 4842 - DNA, 51 bp, Artificial Sequence
  Synthetic polynucleotide
cttgtcctgggacaaggaaggggagrggtgggagtgcgagggatccctccc

SEQ ID NO: 4843 - DNA, 51 bp, Artificial Sequence
  Synthetic polynucleotide
tatttgaatccttgctctgcgatggrctattccctggctgcagccctcact

SEQ ID NO: 4844 - DNA, 51 bp, Artificial Sequence
  Synthetic polynucleotide
cacgctgtttgtggagacatccctgrgacggccacaggacaaggatgccaa

SEQ ID NO: 4845 - DNA, 51 bp, Artificial Sequence
  Synthetic polynucleotide
tcaaacctaagaaatatgtctgataraagagttactttgatagagtaaata

SEQ ID NO: 4846 - DNA, 51 bp, Artificial Sequence
  Synthetic polynucleotide
atttgctgtaaatcaaatcatgggcrgccaagacttcctggtgctagcaat

SEQ ID NO: 4847 - DNA, 51 bp, Artificial Sequence
  Synthetic polynucleotide
tgccacttccctgcggcccccacccrggtacatctttgagtccatcggtgc

SEQ ID NO: 4848 - DNA, 51 bp, Artificial Sequence
  Synthetic polynucleotide
cgatcagccccttaacacgactcgtdtaaatgctgctgaaatagaaagcag

SEQ ID NO: 4849 - DNA, 51 bp, Artificial Sequence
  Synthetic polynucleotide
tcccaggcctccctggagcacgaggrgggcaagatcctccgggcccagctg

SEQ ID NO: 4850 - DNA, 51 bp, Artificial Sequence
  Synthetic polynucleotide
aacgagaggctggaggatgaggaggrgatgaatgctgagctcactgccaag

SEQ ID NO: 4851 - DNA, 51 bp, Artificial Sequence
  Synthetic polynucleotide
ctggtcatgcaccagctgcgctgcartggtgtgctggagggcatccgcatc

SEQ ID NO: 4852 - DNA, 51 bp, Artificial Sequence
  Synthetic polynucleotide
ctgcagaagaacaaggatcctctcartgagactgtcgtgggcttgtatcag

SEQ ID NO: 4853 - DNA, 51 bp, Artificial Sequence
  Synthetic polynucleotide
catgtccatcctggaagaggagtgcrtgttccccaaggccaccgacatgac

SEQ ID NO: 4854 - DNA, 51 bp, Artificial Sequence
  Synthetic polynucleotide
gctgcagcagttcttcaaccaccacrtgtttgtgctggagcaggaggagta

SEQ ID NO: 4855 - DNA, 51 bp, Artificial Sequence
  Synthetic polynucleotide
ttcaactggatggtgacgcgcatcavtgccaccctggagaccaagcagcca

SEQ ID NO: 4856 - DNA, 51 bp, Artificial Sequence
  Synthetic polynucleotide
agggtggcattgatgcgcgtcaccahccagttgaacatcctctcatacact

SEQ ID NO: 4857 - DNA, 51 bp, Artificial Sequence
  Synthetic polynucleotide
ttcagaggagaaaaactccatgtatragctgacaggcgccatcatgcactt

SEQ ID NO: 4858 - DNA, 51 bp, Artificial Sequence
  Synthetic polynucleotide
caggaaagttggcatctgcagacatrgagacctgtgagtgccatgaatctg

SEQ ID NO: 4859 - DNA, 51 bp, Artificial Sequence
  Synthetic polynucleotide
attgcagccattggggaccgcagcargaaggaccagagcccgggcaaggta

SEQ ID NO: 4860 - DNA, 51 bp, Artificial Sequence
  Synthetic polynucleotide
actgagtggaatggagggccgcaagvaaaagtttgagagctgagccttcct

SEQ ID NO: 4861 - DNA, 51 bp, Artificial Sequence
  Synthetic polynucleotide
gcaggtgaagaaggaggacaccgagraggtgagtgtgggctaaggccagga

SEQ ID NO: 4862 - DNA, 51 bp, Artificial Sequence
  Synthetic polynucleotide
tgactcttttcctccctctcatttcrggttcacagcaaaggactgaagcta

SEQ ID NO: 4863 - DNA, 51 bp, Artificial Sequence
  Synthetic polynucleotide
gatgtgtgttctgaaattgtgaaccvtgagtctagtacttaatgatctgct

SEQ ID NO: 4864 - DNA, 51 bp, Artificial Sequence
  Synthetic polynucleotide
tatttaaccacagttcttttcccgtrggctgatccttattcaaaatgggcc

SEQ ID NO: 4865 - DNA, 51 bp, Artificial Sequence
  Synthetic polynucleotide
agttatatacatttttttcctcctcrgaacctaaaaataaaatatgtgttt

SEQ ID NO: 4866 - DNA, 51 bp, Artificial Sequence
  Synthetic polynucleotide
ttctggggctgtttttgtctcctctrgcgtgcccaaagagctgaaaagatt

SEQ ID NO: 4867 - DNA, 51 bp, Artificial Sequence
  Synthetic polynucleotide
ctgtaccaccatccactacaactacrtgtgtaacagttcctgcatgggcgg

SEQ ID NO: 4868 - DNA, 51 bp, Artificial Sequence
  Synthetic polynucleotide
gatgcttgagtacgaaccggccaagrggttctccatccggcagatccggca

SEQ ID NO: 4869 - DNA, 51 bp, Artificial Sequence
  Synthetic polynucleotide
tctctggaactggaggacctctcctrtgtacggataccaggatccttcaag

SEQ ID NO: 4870 - DNA, 51 bp, Artificial Sequence
  Synthetic polynucleotide
atggaagagcctgtgaccatcccagrcaagcccaatagcgaagaggagatt

SEQ ID NO: 4871 - DNA, 51 bp, Artificial Sequence
  Synthetic polynucleotide
gtatgagcaatcatctgttgttttcrggagggacgaagatggtgtgcagat

SEQ ID NO: 4872 - DNA, 51 bp, Artificial Sequence
  Synthetic polynucleotide
tgaccagttgccatggcatcctactrcgagatcctagacgtgccgcgaagt

SEQ ID NO: 4873 - DNA, 51 bp, Artificial Sequence
  Synthetic polynucleotide
aatctaattactgaagagactactcrtgttgttatgaaaacaggtatacca

SEQ ID NO: 4874 - DNA, 51 bp, Artificial Sequence
  Synthetic polynucleotide
gtagatgaaatgatcagagaagcagrtattgatggagacggacaagtcaac

SEQ ID NO: 4875 - DNA, 51 bp, Artificial Sequence
  Synthetic polynucleotide
ttgtattattatttttttaattttcrggggcgacagccagttttgtagtca

SEQ ID NO: 4876 - DNA, 51 bp, Artificial Sequence
  Synthetic polynucleotide
tcctgcctctcttttctccccatacrggacgggctctacgagtgcattctc

SEQ ID NO: 4877 - DNA, 51 bp, Artificial Sequence
  Synthetic polynucleotide
agtggaacagcatcctgagtatgagyacgtccaatcttgatgatctgtgca

SEQ ID NO: 4878 - DNA, 51 bp, Artificial Sequence
  Synthetic polynucleotide
ataaaaacttgtttctattttatttrgagcttaacttagatagcagtaatt

SEQ ID NO: 4879 - DNA, 51 bp, Artificial Sequence
  Synthetic polynucleotide
attcccagtcagaggcgctatgtgtrttattatagctacctgttaaagaat

SEQ ID NO: 4880 - DNA, 51 bp, Artificial Sequence
  Synthetic polynucleotide
ctggtcgacggctacaatgtgcactrtggcgcccgctccatcaaacatgag

SEQ ID NO: 4881 - DNA, 51 bp, Artificial Sequence
  Synthetic polynucleotide
tcctggaactcggacatgtccagcchgatgaagccctgtgtggaaacaagc

SEQ ID NO: 4882 - DNA, 51 bp, Artificial Sequence
  Synthetic polynucleotide
ctcacccgtcccctctcctctgcagractatgaacacttatttaaggtgaa

SEQ ID NO: 4883 - DNA, 51 bp, Artificial Sequence
  Synthetic polynucleotide
tacttagctgacttggagctagatgrggtggaagacttccttggagagctg

SEQ ID NO: 4884 - DNA, 51 bp, Artificial Sequence
  Synthetic polynucleotide
ataggctgcacacggctggtgtccaygatggcggcgcggcggcggtctggc

SEQ ID NO: 4885 - DNA, 51 bp, Artificial Sequence
  Synthetic polynucleotide
tcccatcttctgggcctccagaccaragagttacatctaccgtacccagga

SEQ ID NO: 4886 - DNA, 51 bp, Artificial Sequence
  Synthetic polynucleotide
ctttggtccacctgggaatgggaagrcaatgctggtaagggttctcttcaa

SEQ ID NO: 4887 - DNA, 51 bp, Artificial Sequence
  Synthetic polynucleotide
taaatccataaggttaagttggaccyacagagggaagggaaagagaagcgc

SEQ ID NO: 4888 - DNA, 51 bp, Artificial Sequence
  Synthetic polynucleotide
tcatttacgtcttttgtgcatctatdggagaaggagaaggaagagttggta

SEQ ID NO: 4889 - DNA, 51 bp, Artificial Sequence
  Synthetic polynucleotide
aacaccccctttctttttttttcaargcgaaggacaaggttgcccttttga

SEQ ID NO: 4890 - DNA, 51 bp, Artificial Sequence
  Synthetic polynucleotide
ggagaaggcctgggaggagatacacrtttcgacaatgctgagaagtggact

SEQ ID NO: 4891 - DNA, 51 bp, Artificial Sequence
  Synthetic polynucleotide
caccctagaactgctttcttttcagrtgccccatggtgtggtcactgcaaa

SEQ ID NO: 4892 - DNA, 51 bp, Artificial Sequence
  Synthetic polynucleotide
tgctcgcatcccgcaggctcacctgyttctccggcgtggaagaagtaaggc

SEQ ID NO: 4893 - DNA, 51 bp, Artificial Sequence
  Synthetic polynucleotide
taccacatcatccatgctgacatctrccgctggtttaacatttcgtttgat

SEQ ID NO: 4894 - DNA, 51 bp, Artificial Sequence
  Synthetic polynucleotide
tctgtataaaaataatctctttttcrggaaaacatactaagagaatcactt

SEQ ID NO: 4895 - DNA, 51 bp, Artificial Sequence
  Synthetic polynucleotide
tgcagaaagacttgaaggcgtatacrggaacaatattgatgatgtagtaag

SEQ ID NO: 4896 - DNA, 51 bp, Artificial Sequence
  Synthetic polynucleotide
gttttaaggtttttggattcaaagcdtaaaaaccattacaagatatacaat

SEQ ID NO: 4897 - DNA, 51 bp, Artificial Sequence
  Synthetic polynucleotide
tattctgaggttatctttttaccacrgttgcacaatatccttttgaagacc

SEQ ID NO: 4898 - DNA, 51 bp, Artificial Sequence
  Synthetic polynucleotide
gaacttatcaaacccttttgtgaagrtcttgaccaatggctaagtgaagat

SEQ ID NO: 4899 - DNA, 51 bp, Artificial Sequence
  Synthetic polynucleotide
caccagggagtaactattcccagtcrgaggcgctatgtgtattattatagc

SEQ ID NO: 4900 - DNA, 51 bp, Artificial Sequence
  Synthetic polynucleotide
ttttcttttctttttttttttttttdggacaaaatgtttcacttttgggta

SEQ ID NO: 4901 - DNA, 51 bp, Artificial Sequence
  Synthetic polynucleotide
atccgcgatcaatccctgcaggaggrgctggctcgccagcatgctaacgag

SEQ ID NO: 4902 - DNA, 51 bp, Artificial Sequence
  Synthetic polynucleotide
gcttttaattgtgtttgtttttttcrgggagtcatttaatacttcatgatt

SEQ ID NO: 4903 - DNA, 51 bp, Artificial Sequence
  Synthetic polynucleotide
agcctatggagttgtacttaaatgcrgacacaaggcaagtacattattttt

SEQ ID NO: 4904 - DNA, 51 bp, Artificial Sequence
  Synthetic polynucleotide
cacaatgatgtcctaaaactgtgtgrctttggtaagttaaaaagaaattaa

SEQ ID NO: 4905 - DNA, 51 bp, Artificial Sequence
  Synthetic polynucleotide
atatgataaaaatgtcttctcatttrggaaaagtcctgaaaatattagtca

SEQ ID NO: 4906 - DNA, 51 bp, Artificial Sequence
  Synthetic polynucleotide
catcgtcagcttcttcgtgctcaacrtgttcgtgggcgtcgtggtcgagaa

SEQ ID NO: 4907 - DNA, 51 bp, Artificial Sequence
  Synthetic polynucleotide
tgtttaatttgaattctatttcactrgttccttccaggaggtactttatgc

SEQ ID NO: 4908 - DNA, 51 bp, Artificial Sequence
  Synthetic polynucleotide
aatactttgagaggttggagaaggtraaaataaatgtggggagatgatgag

SEQ ID NO: 4909 - DNA, 51 bp, Artificial Sequence
  Synthetic polynucleotide
ccggactactgcctatcaccattgcrctttattatgtagtactgatgggac

SEQ ID NO: 4910 - DNA, 51 bp, Artificial Sequence
  Synthetic polynucleotide
aaccctggaagctcagttaagggagrctgtgggaacccatctgttggaatt

SEQ ID NO: 4911 - DNA, 51 bp, Artificial Sequence
  Synthetic polynucleotide
taattgttattatttttgtgtgtgcrggtttcattggtcagtttaacagca

SEQ ID NO: 4912 - DNA, 51 bp, Artificial Sequence
  Synthetic polynucleotide
tttattgtgacgcttagcctggtagracttggactcgccaatgtggaagga

SEQ ID NO: 4913 - DNA, 51 bp, Artificial Sequence
  Synthetic polynucleotide
gtcattggatagtgctccatggccahgaaaagagtatttaagacaatacag

SEQ ID NO: 4914 - DNA, 51 bp, Artificial Sequence
  Synthetic polynucleotide
agaggtactcctccccacaccaggtrtggcactgctgagtttactgatgca

SEQ ID NO: 4915 - DNA, 51 bp, Artificial Sequence
  Synthetic polynucleotide
tgtgtgaaagctggtagaaatcccadttatggctacacaagctttgatacc

SEQ ID NO: 4916 - DNA, 51 bp, Artificial Sequence
  Synthetic polynucleotide
ttgcagccaatgtccagagggatatrtgtgtgtgaaagctggtagaaatcc

SEQ ID NO: 4917 - DNA, 51 bp, Artificial Sequence
  Synthetic polynucleotide
acttgcagccaatgtccagagggatrtatgtgtgtgaaagctggtagaaat

SEQ ID NO: 4918 - DNA, 51 bp, Artificial Sequence
  Synthetic polynucleotide
cactattttgacaaactgtgtgtttrtgacaatgagtaaccctcctgattg

SEQ ID NO: 4919 - DNA, 51 bp, Artificial Sequence
  Synthetic polynucleotide
tagctattaagattttggtacattcrtatcctttttcaagtgattaatatt

SEQ ID NO: 4920 - DNA, 51 bp, Artificial Sequence
  Synthetic polynucleotide
tcggcacctgtgacagccacaatccyccggatacccttggcaatggcttct

SEQ ID NO: 4921 - DNA, 51 bp, Artificial Sequence
  Synthetic polynucleotide
tattctccatgctcgctcccgggccygcaacagagagagagagacctctca

SEQ ID NO: 4922 - DNA, 51 bp, Artificial Sequence
  Synthetic polynucleotide
actgggaatgtgtatttgctttgcavactcctatcccccacctccaaacag

SEQ ID NO: 4923 - DNA, 51 bp, Artificial Sequence
  Synthetic polynucleotide
actgaggggactggtggctgttgtcrggcttctcggtggaagggccatcgc

SEQ ID NO: 4924 - DNA, 51 bp, Artificial Sequence
  Synthetic polynucleotide
ggagacctatgacttcgacagcatcrtgcattacgctcggaacacattctc

SEQ ID NO: 4925 - DNA, 51 bp, Artificial Sequence
  Synthetic polynucleotide
ggagccaggacaaaggcttttgttcrggtagcacttcctttttctcctttc

SEQ ID NO: 4926 - DNA, 51 bp, Artificial Sequence
  Synthetic polynucleotide
gtccaattcaatgttacagaaacccrctgcctatgtgcggcccatggacgg

SEQ ID NO: 4927 - DNA, 51 bp, Artificial Sequence
  Synthetic polynucleotide
aatgtcaagctggccctggacatcgrgatcgccacctacaggaagctgcta

SEQ ID NO: 4928 - DNA, 51 bp, Artificial Sequence
  Synthetic polynucleotide
tgaccgctttgccagctacatcgagraggttcgcttcctggaacagcaaaa

SEQ ID NO: 4929 - DNA, 51 bp, Artificial Sequence
  Synthetic polynucleotide
atttgctgttcttcacagctttaggrtatgtatccaatgttttcttcaggt

SEQ ID NO: 4930 - DNA, 51 bp, Artificial Sequence
  Synthetic polynucleotide
acctttctccagctaattcatctggrgatcaaacccgcaatccggaaccag

SEQ ID NO: 4931 - DNA, 51 bp, Artificial Sequence
  Synthetic polynucleotide
cgtccccacagcctgatgttcaccarggtgaagctggagcaggtgctgaaa

SEQ ID NO: 4932 - DNA, 51 bp, Artificial Sequence
  Synthetic polynucleotide
tgagctcaagaaagaaaagcaagtcraccaacgaattgaaaatatgatgca

SEQ ID NO: 4933 - DNA, 51 bp, Artificial Sequence
  Synthetic polynucleotide
agaactgttaccattaagttgaagartgtgaattttgaagtaaaaactcgt

SEQ ID NO: 4934 - DNA, 51 bp, Artificial Sequence
  Synthetic polynucleotide
atttgccattgctaaggaattgctaraaacagaaattgatgctgattttcc

SEQ ID NO: 4935 - DNA, 51 bp, Artificial Sequence
  Synthetic polynucleotide
ggaaatcgagtagaaggtgtaaccayctggggaggtaggttcaggaaacca

SEQ ID NO: 4936 - DNA, 51 bp, Artificial Sequence
  Synthetic polynucleotide
tgaaatcgtggtcatactggaaggcrtggtggaagccactgccatgacgac

SEQ ID NO: 4937 - DNA, 51 bp, Artificial Sequence
  Synthetic polynucleotide
gacatcatccagcggctgtggaaggrctccggtatccaggcctgttttgag

SEQ ID NO: 4938 - DNA, 51 bp, Artificial Sequence
  Synthetic polynucleotide
cagtccctgcaggtgtcttgcccctrtgactccatgaagcactgggggagg

SEQ ID NO: 4939 - DNA, 51 bp, Artificial Sequence
  Synthetic polynucleotide
actggacatagcaaggaagctggatrtgtatggcatcaggcctcaccccgc

SEQ ID NO: 4940 - DNA, 51 bp, Artificial Sequence
  Synthetic polynucleotide
tcactctcaacagtaatcttctccayggtcaagtcagcctcaggggagctc

SEQ ID NO: 4941 - DNA, 51 bp, Artificial Sequence
  Synthetic polynucleotide
agtttcttccacttggaccaccaccrcctcggccacaggtctacccacctt

SEQ ID NO: 4942 - DNA, 51 bp, Artificial Sequence
  Synthetic polynucleotide
gccaactcggaggagatcgccttctrtgggggccatgaggtggggcaggtt

SEQ ID NO: 4943 - DNA, 51 bp, Artificial Sequence
  Synthetic polynucleotide
aggacgcctaccatgggctggctgcdctgggagcgcttcatgtgcaacctt

SEQ ID NO: 4944 - DNA, 51 bp, Artificial Sequence
  Synthetic polynucleotide
ccctgaccctgtccctctcctggccrggaaataccacacacacttgctaca

SEQ ID NO: 4945 - DNA, 51 bp, Artificial Sequence
  Synthetic polynucleotide
ttgctcaattccagtctttaccaccyaaaaaacatataaagcacttgctca

SEQ ID NO: 4946 - DNA, 51 bp, Artificial Sequence
  Synthetic polynucleotide
cgagtatcacgtgatccggcacgccrtgaacctggaggccgtgaacaccta

SEQ ID NO: 4947 - DNA, 51 bp, Artificial Sequence
  Synthetic polynucleotide
acaattgttaacttccttctttgtcrggggtacatgatggatttgacagcc

SEQ ID NO: 4948 - DNA, 51 bp, Artificial Sequence
  Synthetic polynucleotide
ctcaggctcccttggttctctctgcrgtttacatgagctggtgaaacatga

SEQ ID NO: 4949 - DNA, 51 bp, Artificial Sequence
  Synthetic polynucleotide
tctttcttttttattccccaccccarggactgaggaggagaagaaagactg

SEQ ID NO: 4950 - DNA, 51 bp, Artificial Sequence
  Synthetic polynucleotide
ctgctgctggctctgggcgctgcccygccgcagctgcccgctcttctcgga

SEQ ID NO: 4951 - DNA, 51 bp, Artificial Sequence
  Synthetic polynucleotide
atgctgtttttttccctttcccaacrgttgttagccctgaagatctggcta

SEQ ID NO: 4952 - DNA, 51 bp, Artificial Sequence
  Synthetic polynucleotide
gttccccctcccccaggctgggagtrtagcatcaccatccccccggagcgg

SEQ ID NO: 4953 - DNA, 51 bp, Artificial Sequence
  Synthetic polynucleotide
ctgccataaccagcttcgtgtctccrgggcggcgtgatggatgacaagagt

SEQ ID NO: 4954 - DNA, 51 bp, Artificial Sequence
  Synthetic polynucleotide
attacatttcattataattcttttcrggtaacagaaagaaagcaacagttg

SEQ ID NO: 4955 - DNA, 51 bp, Artificial Sequence
  Synthetic polynucleotide
gtgtactcctgtgagtggcctctttrtatgtggccctttcaaaaggtgaga

SEQ ID NO: 4956 - DNA, 51 bp, Artificial Sequence
  Synthetic polynucleotide
ctctgctctctcccttggctactccrggttcttctgtgacccagttgctgg

SEQ ID NO: 4957 - DNA, 51 bp, Artificial Sequence
  Synthetic polynucleotide
ggggttggaatgacccagatatggtraaaacttgagccctccttgttcaag

SEQ ID NO: 4958 - DNA, 51 bp, Artificial Sequence
  Synthetic polynucleotide
gcaggtgggatggagagcatgtccartgttccatatgtaatgaacagagga

SEQ ID NO: 4959 - DNA, 51 bp, Artificial Sequence
  Synthetic polynucleotide
gtctggttaaacacctcttaggtaarcagctcctgaaagacaagtctatcc

SEQ ID NO: 4960 - DNA, 51 bp, Artificial Sequence
  Synthetic polynucleotide
ggctctgaccccttgtcctatgtccdggtcattgctccctggaggatgcct

SEQ ID NO: 4961 - DNA, 51 bp, Artificial Sequence
  Synthetic polynucleotide
ttctgatctaacaatcctcattcccyaagagagaaaagatgattatgacta

SEQ ID NO: 4962 - DNA, 51 bp, Artificial Sequence
  Synthetic polynucleotide
tcttttttacttttttgatgccaatrggaatctgcaagcagaatatgaccg

SEQ ID NO: 4963 - DNA, 51 bp, Artificial Sequence
  Synthetic polynucleotide
acaagtttgctggtgtatggaagacyatacaaaaaggaaaaaaaaatcaaa

SEQ ID NO: 4964 - DNA, 51 bp, Artificial Sequence
  Synthetic polynucleotide
tcagaatcaaaggcatgggaggttgrtacctgccggggccattacaacaat

SEQ ID NO: 4965 - DNA, 51 bp, Artificial Sequence
  Synthetic polynucleotide
cgtcagctaattacatctttccttgrcagctcacaatccaggtgagtgaag

SEQ ID NO: 4966 - DNA, 51 bp, Artificial Sequence
  Synthetic polynucleotide
tgccatctctttgattttctgctcahagaactcctgctcttgttgcacagc

SEQ ID NO: 4967 - DNA, 51 bp, Artificial Sequence
  Synthetic polynucleotide
catcttagttagcgtgtcctctgaarggtacttggtaagtgtggaaagtag

SEQ ID NO: 4968 - DNA, 51 bp, Artificial Sequence
  Synthetic polynucleotide
aaatgcaactgctttaccaccaggtvatgttgttaatggaacgattggcaa

SEQ ID NO: 4969 - DNA, 51 bp, Artificial Sequence
  Synthetic polynucleotide
gaacctgcgaaggacatcggcttcarcgtcgccgtccttctgacaaacctc

SEQ ID NO: 4970 - DNA, 51 bp, Artificial Sequence
  Synthetic polynucleotide
agacagttcatatttgacgtggtcarcgaaggcggagagaaagagaagatg

SEQ ID NO: 4971 - DNA, 51 bp, Artificial Sequence
  Synthetic polynucleotide
acagtgacatggcttctctttttccrgggtgaaggtggtgcccccggactt

SEQ ID NO: 4972 - DNA, 51 bp, Artificial Sequence
  Synthetic polynucleotide
cttagggggccaggacatcttcatgrcagaggagcagaagaagtactacaa

SEQ ID NO: 4973 - DNA, 51 bp, Artificial Sequence
  Synthetic polynucleotide
ctctttgcacttagggggccaggacrtcttcatgacagaggagcagaagaa

SEQ ID NO: 4974 - DNA, 51 bp, Artificial Sequence
  Synthetic polynucleotide
ggtgagcctgacccattatctcgacrggtcctgaatctcttcctggccttg

SEQ ID NO: 4975 - DNA, 51 bp, Artificial Sequence
  Synthetic polynucleotide
gatggtggcttggttttgctcctcayaggccattgcgaccacggccaggat

SEQ ID NO: 4976 - DNA, 51 bp, Artificial Sequence
  Synthetic polynucleotide
ttcactgatcactctcatccttcacrgttttttgaagaggcgcagtctact

SEQ ID NO: 4977 - DNA, 51 bp, Artificial Sequence
  Synthetic polynucleotide
  misc_feature (26)..(26): n is a, c, g, t or u
tggtccagcctggagatcaccttcancctgcgagatgtgagttggctgccc

SEQ ID NO: 4978 - DNA, 51 bp, Artificial Sequence
  Synthetic polynucleotide
gtctctcccaacaccaactcagagargatcttctccatctgcgtcatgctc

SEQ ID NO: 4979 - DNA, 51 bp, Artificial Sequence
  Synthetic polynucleotide
ttcggcaacgtctctcccaacaccadctcagagaagatcttctccatctgc

SEQ ID NO: 4980 - DNA, 51 bp, Artificial Sequence
  Synthetic polynucleotide
gggcttcggcaacgtctctcccaacrccaactcagagaagatcttctccat

SEQ ID NO: 4981 - DNA, 51 bp, Artificial Sequence
  Synthetic polynucleotide
ccacacctccgccttccccgggtgcrggtcctgtccctgggcgccgacgtg

SEQ ID NO: 4982 - DNA, 51 bp, Artificial Sequence
  Synthetic polynucleotide
gagcgcaaagtggaaatcgccttctvccggaaagatggtaggagcgggccg

SEQ ID NO: 4983 - DNA, 51 bp, Artificial Sequence
  Synthetic polynucleotide
ggagaactgcgccgtcatctactgcdacgacggcttctgcgagctgtgcgg

SEQ ID NO: 4984 - DNA, 51 bp, Artificial Sequence
  Synthetic polynucleotide
agaatcctgtgaagcagctccagctrtgtgtgaagaagaggacagcactgc

SEQ ID NO: 4985 - DNA, 51 bp, Artificial Sequence
  Synthetic polynucleotide
gctccccctctcctgcactccacagrcctcatcgtggtcgtggcctccatg

SEQ ID NO: 4986 - DNA, 51 bp, Artificial Sequence
  Synthetic polynucleotide
gggagcctcctgtccattccttcccvggggattcttggctcggggtttgcc

SEQ ID NO: 4987 - DNA, 51 bp, Artificial Sequence
  Synthetic polynucleotide
caatctcctctcctctctccactgcrggctgcgggaacaccatcgggccac

SEQ ID NO: 4988 - DNA, 51 bp, Artificial Sequence
  Synthetic polynucleotide
atcggcgcccgcctgaaccgagtagragacaaggtaggctcacgcgccggc

SEQ ID NO: 4989 - DNA, 51 bp, Artificial Sequence
  Synthetic polynucleotide
tgcatgtgtcccgccggcttccagtrtgaacagttcagtggaggatgccaa

SEQ ID NO: 4990 - DNA, 51 bp, Artificial Sequence
  Synthetic polynucleotide
ttttgcttttttctccctccccccargatattgatgagtgctcccttccga

SEQ ID NO: 4991 - DNA, 51 bp, Artificial Sequence
  Synthetic polynucleotide
ggtcatttccattttgcagatattgrtgagtgtcagagagatcctctccta

SEQ ID NO: 4992 - DNA, 51 bp, Artificial Sequence
  Synthetic polynucleotide
agtcaacgtagaagttacgcgcataraagtgttcgatgcagatgaaatagg

SEQ ID NO: 4993 - DNA, 51 bp, Artificial Sequence
  Synthetic polynucleotide
tgagcaaaggggttctgaggtccatrccaagaagacggtgatgatcaagac

SEQ ID NO: 4994 - DNA, 51 bp, Artificial Sequence
  Synthetic polynucleotide
agaaatatgcatctgcttcttccccrggttaaccagcttcgtggcatcctc

SEQ ID NO: 4995 - DNA, 51 bp, Artificial Sequence
  Synthetic polynucleotide
gatatgaatatttcactcttttctcrggtcctccctcaccaccccttgacc

SEQ ID NO: 4996 - DNA, 51 bp, Artificial Sequence
  Synthetic polynucleotide
acttcatatttcagtttccctccctraagtacatccacgttatgatttaga

SEQ ID NO: 4997 - DNA, 51 bp, Artificial Sequence
  Synthetic polynucleotide
tacttcgaggggctccgcaagcactrcctgctcccggccatcgagtgagtg

SEQ ID NO: 4998 - DNA, 51 bp, Artificial Sequence
  Synthetic polynucleotide
tctatttttcaggtatcctggtcagrtataggaggactggaaagtatcaaa

SEQ ID NO: 4999 - DNA, 51 bp, Artificial Sequence
  Synthetic polynucleotide
acttttgatgcttgtttaattagtgragaattggcttatggatgtacaggg

SEQ ID NO: 5000 - DNA, 51 bp, Artificial Sequence
  Synthetic polynucleotide
cctaaagaaaatgttttaattggtgrcggagctggtttcaaagttgcaatg

SEQ ID NO: 5001 - DNA, 51 bp, Artificial Sequence
  Synthetic polynucleotide
gactgttctggaaatcttttatttcrggacacctcctacctgttcatcact

SEQ ID NO: 5002 - DNA, 51 bp, Artificial Sequence
  Synthetic polynucleotide
catacctatggaggatctttcctctrtcatttgaatgaaggtgaaccccta

SEQ ID NO: 5003 - DNA, 51 bp, Artificial Sequence
  Synthetic polynucleotide
aaaaatgggacaagatggccatgacrgaggagcaaaagttattgctacagg

SEQ ID NO: 5004 - DNA, 51 bp, Artificial Sequence
  Synthetic polynucleotide
tttaggccctggaccatccgccagtrtgctggttttagtactgtggaagaa

SEQ ID NO: 5005 - DNA, 51 bp, Artificial Sequence
  Synthetic polynucleotide
tcaggccatccagatcctgggcggcrtgggctacgtgacagagatgccggc

SEQ ID NO: 5006 - DNA, 51 bp, Artificial Sequence
  Synthetic polynucleotide
tccagctcggccgcctgtcagtgcartgctgccccatgtggtgctcacctt

SEQ ID NO: 5007 - DNA, 51 bp, Artificial Sequence
  Synthetic polynucleotide
gacatttttacactgcttgcccagaragccagaagaagtggatgatgaagt

SEQ ID NO: 5008 - DNA, 51 bp, Artificial Sequence
  Synthetic polynucleotide
acactggtcatctctggctcgggacrctgtgccctggaggccgccctggtc

SEQ ID NO: 5009 - DNA, 51 bp, Artificial Sequence
  Synthetic polynucleotide
cacccacagccgtccctgcttcctcrgggcctggcccagcacaagccagtg

SEQ ID NO: 5010 - DNA, 51 bp, Artificial Sequence
  Synthetic polynucleotide
cgtcccgagcaaaccacccatctacrggcatcgacatcctgtactcgggct

SEQ ID NO: 5011 - DNA, 51 bp, Artificial Sequence
  Synthetic polynucleotide
tggaccaagccccctcgtgtcttccrggtaccatcacacaatccccgtcat

SEQ ID NO: 5012 - DNA, 51 bp, Artificial Sequence
  Synthetic polynucleotide
ctcctgagggcctccctttccccgcrgctgtgaggtggagcagtgggactc

SEQ ID NO: 5013 - DNA, 51 bp, Artificial Sequence
  Synthetic polynucleotide
caccatgtccttgttggcagctaacracttgctggctggcctgagagggga

SEQ ID NO: 5014 - DNA, 51 bp, Artificial Sequence
  Synthetic polynucleotide
gtgggaattgacgcagccattgccartgcttttcgacgaattctgctagct

SEQ ID NO: 5015 - DNA, 51 bp, Artificial Sequence
  Synthetic polynucleotide
gctgtggtgctgcagctgtcccagcrgctgtctggcatcaacgctgtgagt

SEQ ID NO: 5016 - DNA, 51 bp, Artificial Sequence
  Synthetic polynucleotide
ataacagtgtggtttgtttctccgcrgaagctgacgggtcgcctcatgctg

SEQ ID NO: 5017 - DNA, 51 bp, Artificial Sequence
  Synthetic polynucleotide
actttgtcttccttgacgatattctrctttattcaatatgctcattatgtg

SEQ ID NO: 5018 - DNA, 51 bp, Artificial Sequence
  Synthetic polynucleotide
aataaatgtttgcaatggcctccagrtaattcttcctttgaaataaatatc

SEQ ID NO: 5019 - DNA, 51 bp, Artificial Sequence
  Synthetic polynucleotide
catgaatgtacttctggtttgtctgrtcttttggctaatattcagtatcat

SEQ ID NO: 5020 - DNA, 51 bp, Artificial Sequence
  Synthetic polynucleotide
taatttcaaccagcagaaaaagaagdtaagtatttctaatattttctctcc

SEQ ID NO: 5021 - DNA, 51 bp, Artificial Sequence
  Synthetic polynucleotide
atcctggctgtggtggccatggcctrcgaggaacagaatcaggccaccttg

SEQ ID NO: 5022 - DNA, 51 bp, Artificial Sequence
  Synthetic polynucleotide
gggattgaggccagtctagatgtgcrgtacctgatgagtgctggtgccaac

SEQ ID NO: 5023 - DNA, 51 bp, Artificial Sequence
  Synthetic polynucleotide
ggagaagaggaagaggccgttgctgyccaggaagaggcgcttgcgcttctg

SEQ ID NO: 5024 - DNA, 51 bp, Artificial Sequence
  Synthetic polynucleotide
gggccccgcatacctggtcaagaggytggtgatctgcaaggccagggcagc

SEQ ID NO: 5025 - DNA, 51 bp, Artificial Sequence
  Synthetic polynucleotide
gtgggcatcagccgtgagcatgccaraatcttcaactacggccgcatctat

SEQ ID NO: 5026 - DNA, 51 bp, Artificial Sequence
  Synthetic polynucleotide
cacaagggtgtagccaggtggggccygcaccatggctttcaactcactgcc

SEQ ID NO: 5027 - DNA, 51 bp, Artificial Sequence
  Synthetic polynucleotide
gagcagccagctggacattgacaacrtggcgggcgtattctacatgctggc

SEQ ID NO: 5028 - DNA, 51 bp, Artificial Sequence
  Synthetic polynucleotide
cttcttcgctgtcatattcctggctrgctacacagccaatctggctgcctt

SEQ ID NO: 5029 - DNA, 51 bp, Artificial Sequence
  Synthetic polynucleotide
gtcgggtcgccgtccagcctgcagcrtgagcgcccccagcgcgacccccat

SEQ ID NO: 5030 - DNA, 51 bp, Artificial Sequence
  Synthetic polynucleotide
ctgaccaccattggctacggggacargtacccccagacctggaacggcagg

SEQ ID NO: 5031 - DNA, 51 bp, Artificial Sequence
  Synthetic polynucleotide
gcgctccggagcctgcgcttcctgcrgattctgcggatgatccgcatggac

SEQ ID NO: 5032 - DNA, 51 bp, Artificial Sequence
  Synthetic polynucleotide
ctgagagcgcgcgttccctgcccccrggttcctcctggttttctcctgcct

SEQ ID NO: 5033 - DNA, 51 bp, Artificial Sequence
  Synthetic polynucleotide
gtcaccgtcagcgtgctggacaccartgacaatccgccggtcatcaacctg

SEQ ID NO: 5034 - DNA, 51 bp, Artificial Sequence
  Synthetic polynucleotide
cttagtatcaaggtgaccgactccadtgacaacaacccggtgtttagcgag

SEQ ID NO: 5035 - DNA, 51 bp, Artificial Sequence
  Synthetic polynucleotide
ttcacagcagaaggtgcactgacctbgagcttcacaaacatatgtgcttgt

SEQ ID NO: 5036 - DNA, 51 bp, Artificial Sequence
  Synthetic polynucleotide
tctcctccccaggtacaattttgtgrtgctggccctgtcctcctcattcct

SEQ ID NO: 5037 - DNA, 51 bp, Artificial Sequence
  Synthetic polynucleotide
tctgagtgcctgttctcgctcatcartggggacgacatgtttgtgacgttc

SEQ ID NO: 5038 - DNA, 51 bp, Artificial Sequence
  Synthetic polynucleotide
ttcattgaagaactaataaaaaattrtgatgggaaagtacacggggataga

SEQ ID NO: 5039 - DNA, 51 bp, Artificial Sequence
  Synthetic polynucleotide
accacggatagagtaaaagttatggyaagaggagagcctggaactgccaaa

SEQ ID NO: 5040 - DNA, 51 bp, Artificial Sequence
  Synthetic polynucleotide
cccaccccatccccatttcccccccrgcaaggcttcctgagccgacggcta

SEQ ID NO: 5041 - DNA, 51 bp, Artificial Sequence
  Synthetic polynucleotide
gataggcactgagatgatcatcaccraggccggcaggtaatgggcaagctg

SEQ ID NO: 5042 - DNA, 51 bp, Artificial Sequence
  Synthetic polynucleotide
gaggcatctggcttctgttacgtcartgatatcgtcttggccatcctggaa

SEQ ID NO: 5043 - DNA, 51 bp, Artificial Sequence
  Synthetic polynucleotide
tggtccacctgggaatgggaagacartgctggtaagggttctcttcaaatt

SEQ ID NO: 5044 - DNA, 51 bp, Artificial Sequence
  Synthetic polynucleotide
tatcaagaggatggattcgacttagrcttgacctgtatccatttctgcggc

SEQ ID NO: 5045 - DNA, 51 bp, Artificial Sequence
  Synthetic polynucleotide
gggtcctgcaggtatgtgacagggcrcatctgggcctgtcctccaagtgaa

SEQ ID NO: 5046 - DNA, 51 bp, Artificial Sequence
  Synthetic polynucleotide
gatccagaagattttgctgatgagcrgagccttgtgggccgcttcattcat

SEQ ID NO: 5047 - DNA, 51 bp, Artificial Sequence
  Synthetic polynucleotide
ggcatcatcgtggccaatgtcccagrgggtctgctggccactgtcactgta

SEQ ID NO: 5048 - DNA, 51 bp, Artificial Sequence
  Synthetic polynucleotide
tctcaggagctggtcactgcctggtrcatcggcttcctttgtctcatcctg

SEQ ID NO: 5049 - DNA, 51 bp, Artificial Sequence
  Synthetic polynucleotide
actaaatcttacatatttgaaggtartcttagacccattaaaacaagatgt

SEQ ID NO: 5050 - DNA, 51 bp, Artificial Sequence
  Synthetic polynucleotide
ttctgcaagaaatgcattctacgcarccttggtcgaaaggagttgtccaca

SEQ ID NO: 5051 - DNA, 51 bp, Artificial Sequence
  Synthetic polynucleotide
cccaccattagcttcttcctggagcrtttcacgcacgctcgcgtggaggcg

SEQ ID NO: 5052 - DNA, 51 bp, Artificial Sequence
  Synthetic polynucleotide
ctctagagaatcaggccgtccgagcyaacagtgatagaaaatacttctaga

SEQ ID NO: 5053 - DNA, 51 bp, Artificial Sequence
  Synthetic polynucleotide
tcgctttcccatccttttccttcccrgggctactttggagacccctggaat

SEQ ID NO: 5054 - DNA, 51 bp, Artificial Sequence
  Synthetic polynucleotide
caattggagtcagagtcccaaagacrtgggtaagtttcaaaaactttagca

SEQ ID NO: 5055 - DNA, 51 bp, Artificial Sequence
  Synthetic polynucleotide
cgtgcccttctctgctggccccaggractgtataggtttgtatccatctga

SEQ ID NO: 5056 - DNA, 51 bp, Artificial Sequence
  Synthetic polynucleotide
acaaagaaggtggtgaggtagtaggygggcagccggctcatgaacggcagg

SEQ ID NO: 5057 - DNA, 51 bp, Artificial Sequence
  Synthetic polynucleotide
caggggcagctctacccagagcccaytgatggtcacccaggagcccattcc

SEQ ID NO: 5058 - DNA, 51 bp, Artificial Sequence
  Synthetic polynucleotide
caagctgtctacctcttcgtgcaatrtatcatcatggtgaacctgttgatt

SEQ ID NO: 5059 - DNA, 51 bp, Artificial Sequence
  Synthetic polynucleotide
aataaaccctctgcttttgctctatrgttaatcagctcaaagatttgttgc

SEQ ID NO: 5060 - DNA, 51 bp, Artificial Sequence
  Synthetic polynucleotide
caagaacatgatatcactaatttctrtatgctcaccctagacaaagtaagt

SEQ ID NO: 5061 - DNA, 51 bp, Artificial Sequence
  Synthetic polynucleotide
gggatgctgctcctcgtggaggtcartgtcatcagggtgagggtaagcagg

SEQ ID NO: 5062 - DNA, 51 bp, Artificial Sequence
  Synthetic polynucleotide
gatggcagtggcagctcctccaatgyttgtgaagatcacttctgcaatcag

SEQ ID NO: 5063 - DNA, 51 bp, Artificial Sequence
  Synthetic polynucleotide
attttctagttttcttcctctttccrgggggagatggggtacccaggcctg

SEQ ID NO: 5064 - DNA, 51 bp, Artificial Sequence
  Synthetic polynucleotide
cagcatgccctgctctgtgcctcacrgaactacaggatctcatgcacatct

SEQ ID NO: 5065 - DNA, 51 bp, Artificial Sequence
  Synthetic polynucleotide
tgacctgacgcgatctctgtctgacracatcaacctgcctcagggagtgcg

SEQ ID NO: 5066 - DNA, 51 bp, Artificial Sequence
  Synthetic polynucleotide
tccaacacgtccaccttcgtgccctrtgagatcaaagtccaggccgtcaac

SEQ ID NO: 5067 - DNA, 51 bp, Artificial Sequence
  Synthetic polynucleotide
tcaatgattatcattcctatattgcrgtttttcggaggctggtacttctac

SEQ ID NO: 5068 - DNA, 51 bp, Artificial Sequence
  Synthetic polynucleotide
ctgctgaagggccaccccttcttctrtgtgcctgagattgtggatgagctc

SEQ ID NO: 5069 - DNA, 51 bp, Artificial Sequence
  Synthetic polynucleotide
aaacagcaaagctcacatactgaccyggcttttattaacatgatcgttggg

SEQ ID NO: 5070 - DNA, 51 bp, Artificial Sequence
  Synthetic polynucleotide
aaacttccgccacatgcagatgccakagaagatgaccctatagaaagaaaa

SEQ ID NO: 5071 - DNA, 51 bp, Artificial Sequence
  Synthetic polynucleotide
tacttacttgatttttttttttccartcaaacagagcagtatagctgtgac

SEQ ID NO: 5072 - DNA, 51 bp, Artificial Sequence
  Synthetic polynucleotide
ttgtgctgctttatccaattctaacygtcaaacagagagcaaagaacattt

SEQ ID NO: 5073 - DNA, 51 bp, Artificial Sequence
  Synthetic polynucleotide
attgttctgttgtaggtatatgccartctaacatcttgtcaagctcttgga

SEQ ID NO: 5074 - DNA, 51 bp, Artificial Sequence
  Synthetic polynucleotide
cacgtggctcaccagcaacacatagrgaagaaaatgctacggcttgagggc

SEQ ID NO: 5075 - DNA, 51 bp, Artificial Sequence
  Synthetic polynucleotide
aattaaagttcgaactgcccaataayaacatctcagatacctgtgaaaaca

SEQ ID NO: 5076 - DNA, 51 bp, Artificial Sequence
  Synthetic polynucleotide
ccatatggctctctctcttcttccarcctctcaggatgtcctatgaggatt

SEQ ID NO: 5077 - DNA, 51 bp, Artificial Sequence
  Synthetic polynucleotide
aggaatagggaggttctcatgaagabattttaaacttccatgctctgagaa

SEQ ID NO: 5078 - DNA, 51 bp, Artificial Sequence
  Synthetic polynucleotide
cagagtgattaaggaaggggcagtgyagtcgacccacggatgctcctcttt

SEQ ID NO: 5079 - DNA, 51 bp, Artificial Sequence
  Synthetic polynucleotide
tgtctatctctggaaaaattggtcartgagcacaagtgcctgtgtcagata

SEQ ID NO: 5080 - DNA, 51 bp, Artificial Sequence
  Synthetic polynucleotide
tagtaagatgaaacaggccgtccacygtacaaaaaaagatacttccattaa

SEQ ID NO: 5081 - DNA, 51 bp, Artificial Sequence
  Synthetic polynucleotide
tcagttttaaaggagaaaaccaggtraaagtgtctaatatcattagaggat

SEQ ID NO: 5082 - DNA, 51 bp, Artificial Sequence
  Synthetic polynucleotide
ccagtcctggccgtacacaaagcagyacttgcagtagaggtcatcatactc

SEQ ID NO: 5083 - DNA, 51 bp, Artificial Sequence
  Synthetic polynucleotide
ctgaggctggggaacatcgggcagcwtgagcggctgcgggctcttcctgcg
